(19) United States
(12) Patent Application Publication
(10) Pub. No.: US 2024/0002497 A1
(43) Pub. Date: Jan. 4, 2024

(54) NAV1.7 BINDERS

(71) Applicants: MERCK SHARP & DOHME LLC, Rahway, NJ (US); MERCK SHARP & DOHME RESEARCH GMBH, Lucerne (CH)

(72) Inventors: Pravien Damitha Abeywickrema, Blue Bell, PA (US); Erik Depla, Ghent (BE); Bruno Dombrecht, Heusden (BE); Daniel M. Gorman, Redwood City, CA (US); Andrea K. Houghton, Doylestown, PA (US); Robert A. Kastelein, Portola Valley, CA (US); Richard L. Kraus, Chalfont, PA (US); John Majercak, Wayne, PA (US); Kalyan Pande, San Francisco, CA (US); Sujata Sharma, Eagleville, PA (US)

(73) Assignees: MERCK SHARP & DOHME LLC, Rahway, NJ (US); MERCK SHARP & DOHME RESEARCH GMBH, Lucerne (CH)

(21) Appl. No.: 18/252,428

(22) PCT Filed: Nov. 18, 2021
(86) PCT No.: PCT/US2021/059842

§ 371 Date: May 10, 2023

Related U.S. Application Data
(60) Provisional application No. 63/271,963, filed on Oct. 26, 2021.
(60) Provisional application No. 63/115,878, filed on Nov. 19, 2020.

(51) Int. Cl. C07K 16/28; A61P 23/00

(52) U.S. Cl. CPC C07K 16/28; A61P 23/00; A61K 2039/505

(57) ABSTRACT

Antibodies and antigen-binding fragments thereof that bind the human voltage-gated sodium channel Nav1.7α protein subunit (Nav1.7 binders) are described. In particular embodiments, the Nav1.7 binders comprise a heavy-chain immunoglobulin single variable domain (ISVD or VHH).

### BACKGROUND OF THE INVENTION

### Field of the Invention

[0001] The present invention relates to antibodies and antigen-binding fragments thereof that bind the human voltage-gated sodium channel Nav1.7a protein subunit (Nav1.7 binders). In particular, the present invention relates to Nav1.7 binders comprising a heavy-chain immunoglobulin single variable domain (ISVD or VHH).

### Description of Related Art

[0002] Nav1.7α subunit belongs to a family of nine voltage-gated sodium channels that play crucial roles in the electrical conductance of skeletal muscles (Nav1.4α), cardiac muscles (Nav1.5α), central (Nav1.1α, Nav1.2α, Nav1.3α and Nav1.6α) and peripheral (Nav1.1α, Nav1.6α, Nav1.7α, Nav1.8α and Nav1.9α) neurons. Nav1.7α is mainly expressed on different types of afferent fibres of the peripheral nervous system and is essential to the firing of action potentials by boosting subthreshold stimuli (Dib-Hajj & Waxman 2015 Pain 156: 2406). Extensive genetic evidence in mice and men suggests that Nav1.7 is necessary and non-redundant in pain and olfactory pathways (reviewed by Dib-Hajj et al. 2013 Nat Rev Neurosci. 14: 49). Interestingly, a large and diverse body of naturally occurring toxins acts on voltage-gated sodium channels, including Nav1.7α (reviewed by Deuis et al., 2017 Neuropharmaco DOI10.1016/j.neuropharm.2017.04.014). Nav1.7α has been one of the most hotly pursued targets in the field of chronic pain where there is a large unmet need (reviewed by de Lera Ruiz & Kraus 2015 J Med Chem 58: 7093). Marketed painkillers like local anaesthetics effectively target voltage-gated sodium channels but suffer from undesired side effects prohibiting widespread use in chronic pain indications. Recent efforts to generate more selective Nav1.7α small molecule inhibitors or modified peptide toxins have failed to deliver a marketed drug so far. Attempts to generate selective anti-Nav1.7α biologicals were not reproducible (Lee et al 2014 Cell 157:1393; Liu et al. 2016 F1000Res 5:2764; and many patents).

[0003] Four consecutive similar domains, DI to DIV (FIG. 1), make up the nearly 2,000 amino acids large Nav1.7α channel. Each domain has six transmembrane helices (51 to S6 in bottom panel FIG. 1 connected by extracellular loops (ECLs) and intracellular loops (ICLs) (respectively solid and dotted lines in bottom panel FIG. 1. Two small (S1-52 and S3-S4) and one larger (S5-S6) ECL per domain make up the limited extracellular surface of the channel accessible to biologicals (cytoplasmic membrane is marked by dotted lines in top right panel in FIG. 1). The different domains are connected by ICLs (S6-S1) and both N- and C-terminal ends reside at the cytoplasmic side of the channel (marked respectively by N and C in bottom panel FIG. 1). Each domain consists of a voltage sensor domain (VSD; S1-S4) and ion-conducting pore domain (PD; S5-S6) arranged such that the VSD of each domain is closest to the PD of the following domain, in a clockwise orientation. The central Na⁺-conducting pore of the channel (marked by a star in bottom panel 1) is formed by the PDs and their ECLs that line the cavity. FIG. 32 is a schematic representation of Nav1.7α.

[0004] Voltage-gated sodium channels may interact with different Navβ-subunits (Navβ1 to Navβ4) that among other things can modulate the channels' electrophysiological properties and cell surface expression levels (reviewed by Winters & Isom 2016 Current Topics in Membranes 78: 315). The bottom panel of FIG. 1 depicts suggested interaction sites for three different Navβ-subunits, according to recent findings (Das et al. 2016 eLIFE 5:e10960; Zhu et al. 2017 J Gen Physiol 149: 813; Yan et al. 2017 Cell 170: 470).

[0005] A detailed sequence comparison of the different ECLs of huNav1.7α to their ortholog and paralog counterparts can be found in FIGS. 2A-2B. Different splice variants of Nav1.7α exist that through interaction with Navβ1 impact on the electrophysiological properties of the channel (Chatelier et al. 2008 J Neurophysiol 99: 2241; Farmer et al. 2012 PLoS ONE 7: e41750). The major technical drawbacks of Nav1.7α as a target for biologicals are its poor cell surface expression level combined with a limited accessibility to the extracellular surface.

### BRIEF SUMMARY OF THE INVENTION

[0006] The present invention provides Nav1.7 binders, which are immunoglobulin single variable domains (ISVDs) that bind and inhibit Nav1.7α channels with exquisite selectivity over other Nav channel paralogs. The Nav1.7 binders may be useful for preparing formulations for treating chronic pain or pain.

[0007] The present invention provides Nav1.7 binders that bind to a human voltage-gated sodium channel Nav1.7α protein subunit (human NaV1.7a subunit) between amino acids 272 and 331 of the human NaV1.7α subunit Domain 1 S5-S6 loop, wherein the human NaV1.7α subunit comprises the amino acid sequence set forth in SEQ ID NO: 1. In particular embodiments, the Nav1.7 binder contacts amino acids F276, R277, E281, and V331 of the human NaV1.7α subunit, which in particular embodiments, binds to the human NaV1.7α subunit with lower affinity than to human NaV1.7α subunit lacking such substitutions. In certain embodiments, the Nav1.7 binder further is capable of binding a rhesus monkey human NaV1.7α subunit with a lower affinity than it binds to the human NaV1.7α subunit.

[0008] The Nav1.7 binder is an antibody or an antibody fragment, which in specific embodiments is a heavy chain antibody or an ISVD. In particular embodiments, the heavy chain antibody is a camelid antibody and the ISVD is a VHH.

[0009] In particular embodiments, the Nav1.7 binder comprises (a) a complementarity determining region (CDR) 1, CDR1, comprising the amino acid sequence set forth in SEQ ID NO: 247, a CDR2 comprising the amino acid sequence set forth in SEQ ID NO: 248, and a CDR3 comprising the amino acid sequence set forth in SEQ ID NO: 249; or (b) a CDR1 comprising the amino acid sequence set forth in SEQ ID NO: 250, a CDR2 comprising the amino acid sequence set forth in SEQ ID NO: 251, and a CDR3 comprising the amino acid sequence set forth in SEQ ID NO: 252; or (c) a CDR1 comprising the amino acid sequence set forth in SEQ ID NO: 253, a CDR2 comprising the amino acid sequence set forth in SEQ ID NO: 254, and a CDR3 comprising the amino acid sequence SRY; or (d) a CDR1 comprising the amino acid sequence set forth in SEQ ID NO: 256, a CDR2 comprising the amino acid sequence set forth in SEQ ID NO: 257, and a CDR3 comprising the amino acid sequence set forth in SEQ ID NO: 258; or (e) a CDR1 comprising the amino acid sequence set forth in SEQ ID NO: 259, a CDR2 comprising the amino acid sequence set forth in SEQ ID NO: 260, and a CDR3 comprising the amino acid sequence set forth in SEQ ID NO: 261; or (f) a CDR1 comprising the amino acid sequence set forth in SEQ ID NO: 262, a CDR2 comprising the amino acid sequence set forth in SEQ ID NO: 263, and a CDR3 comprising the amino acid sequence set forth in SEQ ID NO: 264; or (g) a CDR1 comprising the amino acid sequence set forth in SEQ ID NO: 196, a CDR2 comprising the amino acid sequence set forth in SEQ ID NO: 198, and a CDR3 comprising the amino acid sequence set forth in SEQ ID NO: 200; or (h) a CDR1 comprising the amino acid sequence set forth in SEQ ID NO: 201, a CDR2 comprising the amino acid sequence set forth in SEQ ID NO: 202, and a CDR3 comprising the amino acid sequence set forth in SEQ ID NO: 206; or (i) a CDR1 comprising the amino acid sequence set forth in SEQ ID NO: 207, a CDR2 comprising the amino acid sequence set forth in SEQ ID NO: 213, and a CDR3 comprising the amino acid sequence set forth in SEQ ID NO: 219; or (j) a CDR1 comprising the amino acid sequence set forth in SEQ ID NO: 221, a CDR2 comprising the amino acid sequence set forth in SEQ ID NO: 223, and a CDR3 comprising the amino acid sequence set forth in SEQ ID NO: 225.

[0010] In a further embodiment, the Nav1.7 binder comprises (a) a CDR1 comprising the amino acid sequence set forth in SEQ ID NO: 196 or SEQ ID NO: 197; a CDR2 comprising the amino acid sequence set forth in SEQ ID NO: 198 or SEQ ID NO: 199; and, a CDR3 comprising the amino acid sequence set forth in SEQ ID NO: 200; or (b) a CDR1 comprising the amino acid sequence set forth in SEQ ID NO: 201; a CDR2 comprising the amino acid sequence set forth in SEQ ID NO: 202, SEQ ID NO: 203, SEQ ID NO: 204, or SEQ ID NO: 205; and, a CDR3 comprising the amino acid sequence set forth in SEQ ID NO: 206; or (c) a CDR1 comprising the amino acid sequence set forth in SEQ ID NO: 207, SEQ ID NO: 208, SEQ ID NO: 209, SEQ ID NO: 210, SEQ ID NO: 211, or SEQ ID NO: 212; a CDR2 comprising the amino acid sequence set forth in SEQ ID NO: 213, SEQ ID NO: 214, SEQ ID NO: 215, SEQ ID NO: 216, SEQ ID NO: 217, or SEQ ID NO: 218; and a CDR3 comprising the amino acid sequence set forth in SEQ ID NO: 219; or (d) a CDR1 comprising the amino acid sequence set forth in SEQ ID NO: 201 or SEQ ID NO: 222; a CDR2 comprising the amino acid sequence set forth in SEQ ID NO: 223 or SEQ ID NO: 224; and a CDR3 comprising the amino acid sequence set forth in SEQ ID NO: 225, SEQ ID NO: 226, SEQ ID NO: 227, SEQ ID NO: 228, SEQ ID NO: 229, SEQ ID NO: 230, SEQ ID NO: 231, SEQ ID NO: 232, or SEQ ID NO: 233; or (e) a CDR1 comprising the amino acid sequence set forth in SEQ ID NO: 201; a CDR2 comprising the amino acid sequence set forth in SEQ ID NO: 205; and, a CDR3 comprising the amino acid sequence set forth in SEQ ID NO: 206; or (0 a CDR1 comprising the amino acid sequence set forth in SEQ ID NO: 211; a CDR2 comprising the amino acid sequence set forth in SEQ ID NO: 215; and, a CDR3 comprising the amino acid sequence set forth in SEQ ID NO: 219; or (g) a CDR1 comprising the amino acid sequence set forth in SEQ ID NO: 222; a CDR2 comprising the amino acid sequence set forth in SEQ ID NO: 223; and, a CDR3 comprising the amino acid sequence set forth in SEQ ID NO: 233.

[0011] In a further embodiment the Nav1.7 binder comprises (a) an amino acid sequence selected from the group consisting of SEQ ID NO: 69, SEQ ID NO: 70, SEQ ID NO: 71, SEQ ID NO: 72, SEQ ID NO: 73, SEQ ID NO: 74, SEQ ID NO: 75, SEQ ID NO: 76, SEQ ID NO: 77, SEQ ID NO: 78, SEQ ID NO: 79, SEQ ID NO: 80, and SEQ ID NO: 81; or (b) an amino acid sequence selected from the group consisting of SEQ ID NO: 82, SEQ ID NO: 83, SEQ ID NO: 84, SEQ ID NO: 85, SEQ ID NO: 86, SEQ ID NO: 87, SEQ ID NO: 88, SEQ ID NO: 89, SEQ ID NO: 90, SEQ ID NO: 91, SEQ ID NO: 92, SEQ ID NO: 93, SEQ ID NO: 94, SEQ ID NO: 95, SEQ ID NO: 96, and SEQ ID NO: 97; or (c) an amino acid sequence selected from the group consisting of SEQ ID NO: 98, SEQ ID NO: 99, SEQ ID NO: 100, SEQ ID NO: 102, SEQ ID NO: 103, SEQ ID NO: 104, SEQ ID NO: 105, SEQ ID NO: 106, SEQ ID NO: 107, SEQ ID NO: 108, SEQ ID NO: 109, SEQ ID NO: 110, SEQ ID NO: 111, SEQ ID NO: 112, SEQ ID NO: 113, SEQ ID NO: 114, SEQ ID NO: 115, SEQ ID NO: 116, SEQ ID NO: 117, SEQ ID NO: 118, SEQ ID NO: 119, SEQ ID NO: 120, SEQ ID NO: 121, SEQ ID NO: 122, SEQ ID NO: 123, SEQ ID NO: 124, SEQ ID NO: 125, SEQ ID NO: 126, SEQ ID NO: 127, SEQ ID NO: 128, SEQ ID NO: 129, SEQ ID NO: 130, SEQ ID NO: 131, SEQ ID NO: 132, SEQ ID NO: 133, SEQ ID NO: 134, SEQ ID NO: 135, SEQ ID NO: 136, SEQ ID NO: 137, SEQ ID NO: 138, SEQ ID NO: 139, SEQ ID NO: 140, SEQ ID NO: 141, SEQ ID NO: 142, SEQ ID NO: 143, SEQ ID NO: 144, SEQ ID NO: 145, SEQ ID NO: 146, SEQ ID NO: 147, SEQ ID NO: 148, SEQ ID NO: 149, SEQ ID NO: 150, SEQ ID NO: 151, SEQ ID NO: 152, and SEQ ID NO: 153; or (d) an amino acid sequence selected from the group consisting of SEQ ID NO: 154, SEQ ID NO: 155, SEQ ID NO: 156, SEQ ID NO: 157, SEQ ID NO: 158, SEQ ID NO: 159, SEQ ID NO: 160, SEQ ID NO: 161, SEQ ID NO: 162, SEQ ID NO: 163, SEQ ID NO: 164, SEQ ID NO: 165, SEQ ID NO: 166, SEQ ID NO: 167, SEQ ID NO: 168, SEQ ID NO: 169, SEQ ID NO: 170, SEQ ID NO: 171, SEQ ID NO: 172, SEQ ID NO: 173, SEQ ID NO: 174, SEQ ID NO: 175, SEQ ID NO: 176, SEQ ID NO: 177, SEQ ID NO: 178, SEQ ID NO: 179, SEQ ID NO: 180, SEQ ID NO: 181, SEQ ID NO: 182, SEQ ID NO: 183, SEQ ID NO: 184, SEQ ID NO: 185, SEQ ID NO: 186, SEQ ID NO: 187, SEQ ID NO: 188, SEQ ID NO: 189, SEQ ID NO: 190, SEQ ID NO: 191, SEQ ID NO: 192, SEQ ID NO: 193, SEQ ID NO: 194, and SEQ ID NO: 195.

[0012] In particular embodiments, the Nav1.7 binder comprises a C-terminal alanine residue.

[0013] In particular embodiments, the Nav1.7 binder is conjugated to a half-life extender, which in certain embodiments is a human serum albumin (HSA) binder or the crystallizable fragment (Fc) of an antibody. HSA binders include but are not limited ALB11002 or ALB00223. In particular embodiments, the Nav1.7 binder is conjugated to is polyethylene glycol, which provides half-life extension.

[0014] The present invention further provides for use of a Nav1.7 binder disclosed herein for the manufacture of a medicament for the treatment of chronic pain.

[0015] The present invention further provides for use of a Nav1.7 binder disclosed herein for the treatment of chronic pain.

[0016] The present invention further provides a method for treating an individual with chronic pain comprising administering to the individual a therapeutically effective amount of a Nav1.7 binder disclosed herein to treat the chronic pain. The individual may be a human patient in need of pain relief. The human patient may be treated in a hospital setting or in an out-patient setting. The Nav1.7 binder may be administered by syringe, autoinjector, dose-settable delivery device, or the like.

[0017] The present invention further provides a composition comprising a Nav1.7 binder disclosed herein and a pharmaceutically acceptable carrier.

[0018] The present invention further provides a nucleic acid molecule encoding the Nav1.7 binder disclosed herein. In a further embodiment the nucleic acid molecule encoding the Nav1.7 binder comprises a nucleotide sequence selected from the group consisting of nucleotide sequences set forth in SEQ ID NO: 273-283. In a further embodiment the nucleic acid molecule encoding the Nav1.7 binder comprises a nucleotide sequence selected from the group consisting of nucleotide sequences set forth in SEQ ID NO: 284-421.

[0019] The present invention further provides a vector comprising the nucleic acid molecule encoding a Nav.7 binder. The present invention further provides a host cell comprising a nucleic acid molecule encoding a Nav1.7 binder disclosed herein.

[0020] The present invention further provides a method for producing a Nav1.7 binder disclosed herein comprising: (a) providing a host cell comprising a nucleic acid molecule encoding a Nav1.7 binder disclosed herein or a vector comprising a nucleic acid molecule encoding the Nav1.7 binder disclosed herein; (b) cultivating the host cell in a medium under conditions suitable for expression of the Nav1.7 binder by the host cell; and (c) isolating the Nav1.7 binder from the medium to provide the Nav1.7 binder.

[0021] The present invention further provides a Navβ1 binder comprising (a) a first immunoglobulin single variable domain (ISVD) comprising three complementarity determining regions (CDRs) wherein CDR1 comprises the amino acid sequence set forth in SEQ ID NO: 425, CDR2 comprises the amino acid sequence set forth in SEQ ID NO: 426, and CDR3 comprises the amino acid sequence set forth in SEQ ID NO: 427; or (b) a second ISVD comprising three CDRs wherein CDR1 comprises the amino acid sequence set forth in SEQ ID NO: 437, CDR2 comprises the amino acid sequence set forth in SEQ ID NO: 438, and CDR3 comprise the amino acid sequence set forth in SEQ ID NO: 439.

[0022] Ina further embodiment of the Navβ1 binder, the first ISVD comprises the amino acid sequence set forth in SEQ ID NO: 411 and the second ISVD comprises the amino acid sequence set forth in SEQ ID NO: 415. In a further embodiment, the N-terminal amino acid of the first ISVD or the second ISVD is linked to the C-terminal amino acid of a Nav1.7 binder of claim 1 by a peptide or polypeptide linker or the N-terminal amino acid of the Nav1.7 binder of claim 1 is linked to the C-terminal amino acid of the first ISVD or the second ISVD by a peptide or polypeptide linker.

[0023] In further embodiments of the Navβ1 binder, the peptide or polypeptide linker comprises any combination of glycine and serine amino acids up to 40 amino acids. In a further embodiment of the Navβ1 binder, the peptide or polypeptide linker comprises an amino acid sequence comprising GGGGS (SEQ ID NO: 246)) n wherein n is 1, 2, 3,4, 5, 6, 7, 8, 9 or 10. In a particular embodiment, the polypeptide linker comprises the amino acid sequence set forth in SEQ ID NO: 463.

[0024] The present invention further provides a nucleic acid molecule encoding a Navβ1 binder disclosed herein. In a further embodiment, the Navβ1 binder comprises a nucleotide sequence selected from the group consisting of nucleotide sequences set forth in SEQ ID NO: 456 and 461.

[0025] The present invention further provides a vector comprising the nucleic acid molecule encoding a Navβ1 binder disclosed herein. The present invention further provides a host cell comprising a nucleic acid molecule encoding a Navβ1 binder disclosed herein.

[0026] The present invention further provides a method for producing a Navβ1 binder disclosed herein comprising: (a) providing a host cell comprising a nucleic acid molecule encoding a Navβ1 binder disclosed herein or a vector comprising a nucleic acid molecule encoding the Navβ1 binder disclosed herein; (b) cultivating the host cell in a medium under conditions suitable for expression of the Navβ1 binder by the host cell; and (c) isolating the Navβ1 binder from the medium to provide the Navβ1 binder.

[0027] The present invention further provides a Navβ2 binder comprising (a) a first immunoglobulin single variable domain (ISVD) comprising three complementarity determining regions (CDRs) wherein CDR1 comprises the amino acid sequence set forth in SEQ ID NO: 422, a CDR2 comprising the amino acid sequence set forth in SEQ ID NO: 423, and a CDR3 comprising the amino acid sequence set forth in SEQ ID NO: 424; (b) a second ISVD comprising three CDRs wherein CDR1 comprises the amino acid sequence set forth in SEQ ID NO: 428, a CDR2 comprising the amino acid sequence set forth in SEQ ID NO: 429, and a CDR3 comprising the amino acid sequence set forth in SEQ ID NO: 430; (c) a third ISVD comprising three CDRs wherein CDR1 comprises the amino acid sequence set forth in SEQ ID NO: 431, a CDR2 comprising the amino acid sequence set forth in SEQ ID NO: 432, and a CDR3 comprising the amino acid sequence set forth in SEQ ID NO: 433; or (d) a fourth ISVD comprising three CDRs wherein CDR1 comprises the amino acid sequence set forth in SEQ ID NO: 434, a CDR2 comprising the amino acid sequence set forth in SEQ ID NO: 435, and a CDR3 comprising the amino acid sequence set forth in SEQ ID NO: 436.

[0028] In a further embodiment of the Navβ2 binder, the first ISVD comprises the amino acid sequence set forth in SEQ ID NO: 410, the second ISVD comprises the amino acid sequence set forth in SEQ ID NO: 412, the third ISVD comprises the amino acid sequence set forth in SEQ ID NO: 413, and the fourth ISVD comprises the amino acid sequence set forth in SEQ ID NO: 414.

[0029] In a further embodiment of the Navβ2 binder, the N-terminal amino acid of the first ISVD, the second ISVD, the third ISVD, or the fourth ISVD is linked to the C-terminal amino acid of a Nav1.7 binder of claim 1 by a peptide or polypeptide linker or the N-terminal amino acid of the Nav1.7 binder of claim 1 is linked to the C-terminal amino acid of the first ISVD, the second ISVD, the third ISVD, or the fourth ISVD by a peptide or polypeptide linker.

[0030] In a further embodiment, the peptide or polypeptide linker comprises any combination of glycine and serine amino acids up to 40 amino acids. In further embodiments, the peptide or polypeptide linker comprises an amino acid sequence comprising GGGGS (SEQ ID NO: 246)) n wherein n is 1, 2, 3,4, 5, 6, 7, 8, 9 or 10. In particular embodiments, the polypeptide linker comprises the amino acid sequence set forth in SEQ ID NO: 463.

[0031] The present invention further provides a nucleic acid molecule encoding a Navβ2 binder disclosed herein. In a further embodiment, the Navβ1 binder comprises a nucleotide sequence selected from the group consisting of nucleotide sequences set forth in SEQ ID NO: 456, 458, 459, and 460.

[0032] The present invention further provides a vector comprising the nucleic acid molecule encoding a Navβ1 binder disclosed herein. The present invention further provides a host cell comprising a nucleic acid molecule encoding a Navβ1 binder disclosed herein.

[0033] The present invention further provides a method for producing a Navβ1 binder disclosed herein comprising: (a) providing a host cell comprising a nucleic acid molecule encoding a Navβ1 binder disclosed herein or a vector comprising a nucleic acid molecule encoding the Navβ1 binder disclosed herein; (b) cultivating the host cell in a medium under conditions suitable for expression of the Navβ1 binder by the host cell; and (c) isolating the Navβ1 binder from the medium to provide the Navβ1 binder.

[0034] The present invention further provides a Nav1.7-Navβ bispecific binder comprising a Nav1.7 binder as disclosed herein and a Navβ binder selected from the group consisting of the Navβ1 binder or Navβ2 binder as disclosed herein.

[0035] In further embodiments of the Nav1.7-Navβ bispecific binder, (a) the Nav1.7 binder comprises: (i) an amino acid sequence selected from the group consisting of SEQ ID NO: 46, SEQ ID NO: 47, SEQ ID NO: 48, SEQ ID NO: 49, SEQ ID NO: 50, SEQ ID NO: 51, SEQ ID NO: 52, SEQ ID NO: 53, SEQ ID NO: 54, and SEQ ID NO: 55; (ii) an amino acid sequence selected from the group consisting of SEQ ID NO: 69, SEQ ID NO: 70, SEQ ID NO: 71, SEQ ID NO: 72, SEQ ID NO: 73, SEQ ID NO: 74, SEQ ID NO: 75, SEQ ID NO: 76, SEQ ID NO: 77, SEQ ID NO: 78, SEQ ID NO: 79, SEQ ID NO: 80, and SEQ ID NO: 81; or (iii) an amino acid sequence selected from the group consisting of SEQ ID NO: 82, SEQ ID NO: 83, SEQ ID NO: 84, SEQ ID NO: 85, SEQ ID NO: 86, SEQ ID NO: 87, SEQ ID NO: 88, SEQ ID NO: 89, SEQ ID NO: 90, SEQ ID NO: 91, SEQ ID NO: 92, SEQ ID NO: 93, SEQ ID NO: 94, SEQ ID NO: 95, SEQ ID NO: 96, and SEQ ID NO: 97; or (iv) an amino acid sequence selected from the group consisting of SEQ ID NO: 98, SEQ ID NO: 99, SEQ ID NO: 100, SEQ ID NO: 102, SEQ ID NO: 103, SEQ ID NO: 104, SEQ ID NO: 105, SEQ ID NO: 106, SEQ ID NO: 107, SEQ ID NO: 108, SEQ ID NO: 109, SEQ ID NO: 110, SEQ ID NO: 111, SEQ ID NO: 112, SEQ ID NO: 113, SEQ ID NO: 114, SEQ ID NO: 115, SEQ ID NO: 116, SEQ ID NO: 117, SEQ ID NO: 118, SEQ ID NO: 119, SEQ ID NO: 120, SEQ ID NO: 121, SEQ ID NO: 122, SEQ ID NO: 123, SEQ ID NO: 124, SEQ ID NO: 125, SEQ ID NO: 126, SEQ ID NO: 127, SEQ ID NO: 128, SEQ ID NO: 129, SEQ ID NO: 130, SEQ ID NO: 131, SEQ ID NO: 132, SEQ ID NO: 133, SEQ ID NO: 134, SEQ ID NO: 135, SEQ ID NO: 136, SEQ ID NO: 137, SEQ ID NO: 138, SEQ ID NO: 139, SEQ ID NO: 140, SEQ ID NO: 141, SEQ ID NO: 142, SEQ ID NO: 143, SEQ ID NO: 144, SEQ ID NO: 145, SEQ ID NO: 146, SEQ ID NO: 147, SEQ ID NO: 148, SEQ ID NO: 149, SEQ ID NO: 150, SEQ ID NO: 151, SEQ ID NO: 152, and SEQ ID NO: 153; or (v) an amino acid sequence selected from the group consisting of SEQ ID NO: 154, SEQ ID NO: 155, SEQ ID NO: 156, SEQ ID NO: 157, SEQ ID NO: 158, SEQ ID NO: 159, SEQ ID NO: 160, SEQ ID NO: 161, SEQ ID NO: 162, SEQ ID NO: 163, SEQ ID NO: 164, SEQ ID NO: 165, SEQ ID NO: 166, SEQ ID NO: 167, SEQ ID NO: 168, SEQ ID NO: 169, SEQ ID NO: 170, SEQ ID NO: 171, SEQ ID NO: 172, SEQ ID NO: 173, SEQ ID NO: 174, SEQ ID NO: 175, SEQ ID NO: 176, SEQ ID NO: 177, SEQ ID NO: 178, SEQ ID NO: 179, SEQ ID NO: 180, SEQ ID NO: 181, SEQ ID NO: 182, SEQ ID NO: 183, SEQ ID NO: 184, SEQ ID NO: 185, SEQ ID NO: 186, SEQ ID NO: 187, SEQ ID NO: 188, SEQ ID NO: 189, SEQ ID NO: 190, SEQ ID NO: 191, SEQ ID NO: 192, SEQ ID NO: 193, SEQ ID NO: 194, and SEQ ID NO: 195; (b) the Navβ1 binder comprises an amino acid sequence selected from the group consisting of SEQ ID NO: 411 and SEQ ID NO: 415; and, (c) the Navβ2 binder comprises an amino acid sequence selected from the group consisting of SEQ ID NO: 410, SEQ ID NO: 412, SEQ ID NO: 413, and SEQ ID NO: 414.

[0036] The present invention further provides a Nav1.7-Navβ bispecific binder wherein the Nav1.7-Navβ bispecific binder is linked to a half-life extender.

[0037] The present invention further provides a Nav1.7-Navβ bispecific binder disclosed herein wherein the half-life extender is a human serum albumin (HSA) binder or HC constant domain or crystallizable fragment (Fc domain). The present invention further provides a Nav1.7-Navβ bispecific binder disclosed herein wherein the Nav1.7-Navβ bispecific binder comprises a C-terminal alanine residue.

[0038] The present invention further provides a composition comprising a Nav1.7-Navβ bispecific binder disclosed herein and a pharmaceutically acceptable carrier.

[0039] The present invention further provides for the use of a Nav1.7-Navβ bispecific binder disclosed herein for the manufacture of a medicament for the treatment of chronic pain.

[0040] The present invention further provides a Nav1.7-Navβ bispecific binder disclosed herein or a composition comprising said Nav1.7-Navβ bispecific binder for the treatment of chronic pain.

[0041] The present invention further provides a method for treating an individual with chronic pain comprising administering to the individual a therapeutically effective amount of the Nav1.7-Navβ bispecific binder disclosed herein or a composition comprising said Nav1.7-Navβ bispecific binder to treat the chronic pain.

[0042] The present invention further provides a nucleic acid molecule encoding a Nav1.7-Navβ bispecific binder comprising a nucleic acid molecule encoding a Nav1.7 binder disclosed herein and a Navβ1 or Navβ2 binder disclosed herein. In a further embodiment, the nucleic acid molecule encoding the Nav1.7 binder comprises a nucleotide sequence selected from the group consisting of nucleotide sequences set forth in SEQ ID NO: 273-283, the Navβ1 binder comprises a nucleotide sequence selected from the group consisting of nucleotide sequences set forth in SEQ ID NO: 457 and 461, and Navβ2 binder comprises a nucleotide sequence selected from the group consisting of nucleotide sequences set forth in SEQ ID NO: 456, 458, 459, and 460. In a further embodiment, the nucleic acid molecule encoding the Nav1.7 binder comprises a nucleotide sequence selected from the group consisting of nucleotide sequences set forth in SEQ ID NO: 284-421, the Navβ1 binder comprises a nucleotide sequence selected from the group consisting of nucleotide sequences set forth in SEQ ID NO: 457 and 461, and Navβ2 binder comprises a nucleotide sequence selected from the group consisting of nucleotide sequences set forth in SEQ ID NO: 456, 458, 459, and 460.

[0043] The present invention further provides a vector comprising the nucleic acid molecule encoding a Nav1.7-Navβ bispecific binder disclosed herein. The present invention further provides a host cell comprising a nucleic acid molecule encoding a Nav1.7-Navβ bispecific binder disclosed herein.

[0044] The present invention further provides a method for producing a Nav1.7-Navβ bispecific binder disclosed herein comprising: (a) providing a host cell comprising a nucleic acid molecule encoding a Nav1.7-Navβ bispecific binder disclosed herein or a vector comprising a nucleic acid molecule encoding the Nav1.7-Navβ bispecific binder disclosed herein; (b) cultivating the host cell in a medium under conditions suitable for expression of the Nav1.7-Navβ bispecific binder by the host cell; and (c) isolating the Nav1.7-Navβ bispecific binder from the medium to provide the Nav1.7-Navβ bispecific binder.

[0045] The present invention further provides a Nav1.7 binder, Navβ1 binder, or Navβ2 binder comprising an amino acid sequence disclosed in Table 56. The present invention further provides a nucleic acid molecule encoding a Nav1.7 binder, Navβ1 binder, or Navβ2 binder and comprising a nucleotide sequence having at least 80, 90%, 95%, or 100% identity to a nucleotide sequence disclosed in Table 56 provided the amino acid sequence encoded by the nucleotide sequence is disclosed in Table 56. The present invention further provides a Nav1.7-Navβ bispecific binder comprising an amino acid sequence disclosed in Table 56 or comprised of a Nav1.7 binder and at least one Navβ binder selected from Navβ1 binder and Navβ2 binder, each comprising an amino acid sequence disclosed in Table 56. The present invention further provides a nucleic acid molecule comprising a nucleotide sequence encoding a Nav1.7-Navβ bispecific binder wherein the nucleotide sequence has at least 80, 90%, 95%, or 100% identity to a nucleotide sequence disclosed in Table 56 provided the nucleotide sequence encodes an amino acid sequence disclosed in Table 56.

### BRIEF DESCRIPTION OF THE DRAWINGS

[0046] FIG. 1 shows the proposed structure of Nav1.7α. Drawing shows a huNav1.7α model viewed from top/extracellular (top left panel) and side through cytoplasmic membrane (top right panel). Nav1.7α structural topology viewed from extracellular side (bottom panel) shown with β1, β2, and β3 subunits.

[0047] FIG. 2A and FIG. 2B together show sequence comparisons of huNav1.7α to paralogs and orthologs (based on sequences listed in the Table 41).

[0048] FIG. 3A shows the binding of ISVDs F103262CO2, F0103265B04, F0103262B06, F0103265A11 to huNav1.7α+β1−β2−β3. MFI=median fluorescence intensity; IRR=irrelevant control ISVD; a-FLAG is a detection moiety.

[0049] FIG. 3B shows the binding of ISVD F0103362B08 to huNav1.7α++β1−β2−β3. MFI=median fluorescence intensity; a-FLAG is a detection moiety.

[0050] FIG. 3C shows the binding of ISVDs F103262CO2, F0103265B04, F0103262B06, F0103265A11 to huNav1.7α+β1. MFI=median fluorescence intensity; IRR=irrelevant control ISVD; a-FLAG is a detection moiety.

[0051] FIG. 3D shows the binding of ISVDs F103262CO2, F0103265B04, F0103262B06, F0103265A11 to huNav1.5α−β1−β2−β3. MFI=median fluorescence intensity; IRR=irrelevant control ISVD; a-FLAG is a detection moiety.

[0052] FIG. 3E shows the binding of ISVDs F0103265B04 and F0103262B08, to huNav1.7+β1−β2−β3. MFI=median fluorescence intensity; IRR=irrelevant control ISVD; a-FLAG is a detection moiety.

[0053] FIG. 3F shows the binding of ISVDs F0103265B04 and F0103262B08, to huNav1.5α−β1−β2−β3. MFI=median fluorescence intensity; IRR=irrelevant control ISVD; a-FLAG is a detection moiety.

[0054] FIG. 3G shows the binding of ISVDs F103262CO2, F0103265B04, F0103262B06, F0103265A11 to huNav157chimera14−β1−β2−β3. MFI=median fluorescence intensity; IRR=irrelevant control ISVD; a-FLAG is a detection moiety.

[0055] FIG. 3H shows the binding of ISVDs F0103265B04 and F0103262B08, to huNav1.7α+β1. MFI=median fluorescence intensity; IRR=irrelevant control ISVD; a-FLAG is a detection moiety.

[0056] FIG. 3I shows the binding of ISVDs F0103265B04 and F0103262B08, to huNav157chimera14−β1−β2−β3. MFI=median fluorescence intensity; IRR=irrelevant control ISVD; a-FLAG is a detection moiety.

[0057] FIG. 4 shows a sequence alignment of functional Nav1.7α+selective ISVDs compared to the human VH3-JH consensus sequence (SEQ ID NO: 57). Residues identical to the human VH3-JH consensus are shown by dots. CDRs are highlighted. The amino acid sequences for the ISVDs are F0103265B04 (SEQ ID NO: 49); F0103275B05 (SEQ ID NO: 50), F0103387G04 (SEQ ID NO: 52); F0103265A11 (SEQ ID NO: 48); F0103387G05 (SEQ ID NO: 53); F0103362B08 (SEQ ID NO: 51).

[0058] FIG. 5 shows screening of the F0103275B05 (275B05) stage I affinity maturation library in binding fluorescence-activated cell sorting (FACS) on huNav1.7α and rhNav1.7α.

[0059] FIG. 6 shows screening of the F0103275B05 (275B05) stage II affinity maturation library in binding FACS on huNav1.7α and rhNav1.7α.

[0060] FIG. 7A shows a schematic for a single pulse electrophysiology protocol.

[0061] FIG. 7B shows a schematic for a two pulse electrophysiology protocol.

[0062] FIG. 8 shows screening of the F0103265A11 (265A11) stage I affinity maturation library in binding FACS on huNav1.7α and rhNav1.7α.

[0063] FIG. 9 shows screening of the F0103265A11 (265A11) stage II affinity maturation library in binding FACS on huNav1.7α and rhNav1.7α.

[0064] FIG. 10 shows screening of the F0103265B04 (265B04) stage I affinity maturation library in binding FACS on huNav1.7α and rhNav1.7α.

[0065] FIG. 11 shows screening of the F0103387G05 (387G05) stage I affinity maturation library in binding FACS on huNav1.7α and rhNav1.7α.

[0066] FIG. 12 shows screening of the F0103362B08 (362B08) stage I affinity maturation library in binding FACS on huNav1.7α and rhNav1.7α.

[0067] FIG. 13 shows screening of the F0103464B09 (464B09) stage I affinity maturation library in binding FACS on huNav1.7α and rhNav1.7α.

[0068] FIG. 14 shows screening of the F0103464B09 (464B09) stage II affinity maturation library in binding FACS on huNav1.7α and rhNav1.7α.

[0069] FIG. 15A shows competition FACS of extracellular anti-Nav1.7α ISVDs vs. F0103265B04 on stable HEK cell lines expressing huNav1.7+β1−β2−β3.

[0070] FIG. 15B shows competition FACS of extracellular anti-Nav1.7α ISVDs vs. F0103265B04 on stable HEK cell lines expressing huNav1.7α+β1−β2−β3.

[0071] FIG. 15C shows competition FACS of extracellular anti-Nav1.7α ISVDs vs. F0103275B05(N93R) on stable CHO cell lines expressing huNav1.7α+β1−β2−β3.

[0072] FIG. 15D shows competition FACS of extracellular anti-Nav1.7α ISVDs vs. F0103275B05(N93R) on stable CHO cell lines expressing rhNav1.7α+β1−β2−β3.

[0073] FIG. 16 shows a schematic overview of huNav1.7α+huNav1.5α (huNav157) chimeras.

[0074] FIG. 17A, FIG. 17B, and FIG. 17C together show epitope mapping FACS of extracellular anti-Nav1.7α ISVDs (1 μM) on transiently transfected cells expressing huNav157+β1−β2−β3 chimeras 1, 2, 3, or 4 (huNav157chim1, huNav157chim2, huNav157chim3, or huNav157chim4, respectively) compared to cells expressing huNav1.7α+β1−β2−β3.

[0075] FIG. 18A, FIG. 18B, and FIG. 18C together show epitope mapping FACS of extracellular anti-Nav1.7α ISVDs (1 μM) on transiently transfected cells expressing huNav157+β1−β2−β3 chimeras 5, 6, 7, or 8 (huNav157chim5, huNav157chim6, huNav157chim7, or huNav157chim8, respectively) compared to cells expressing huNav1.7α+β1−β2−β3.

[0076] FIG. 19A and FIG. 19B together show epitope mapping FACS of extracellular anti-Nav1.7α ISVDs (1 μM) on transiently transfected cells expressing huNav157+β1−β2−β3 chimeras 9 or 12 (huNav157chim9 or huNav157chim12, respectively) compared to cells expressing huNav1.7α+β1−β2−β3.

[0077] FIG. 20A and FIG. 20B together show epitope mapping FACS of extracellular anti-Nav1.7α ISVDs (1 μM) on transiently transfected cells expressing huNav157+β1−β2−β3 chimeras 22 or 18 (huNav157chim22 or huNav157chim18, respectively) compared to cells expressing huNav1.7α+β1−β2−β3.

[0078] FIG. 21A and FIG. 21B together show shows epitope mapping FACS of extracellular anti-Nav1.7α ISVDs (1 μM) on transiently transfected cells expressing huNav1.7+β1−β2−β3, rhNav1.7+β1−β2−β3 or huNav1.7(N146S, V1941, F276V, R277Q, E281V, V331M, E504D, D507E, S508N, N533S)−β1−β2−β3.

[0079] FIG. 22A shows binding FACS of extracellular anti-Nav1.7α ISVDs on stable huNav1.7α-rhNav1.7α chimera cell line CHO FlpIn huNav1.7α+β1−β2−β3.

[0080] FIG. 22B shows binding FACS of extracellular anti-Nav1.7α ISVDs on stable huNav1.7α-rhNav1.7α chimera cell line CHO FlpIn RhNav1.7α+β1−β2−β3.

[0081] FIG. 22C shows binding FACS of extracellular anti-Nav1.7α ISVDs on stable huNav1.7α-rhNav1.7α chimera cell line CHO FlpIn Nav1.7α(F276V)+β1−β2−β3.

[0082] FIG. 22D shows binding FACS of extracellular anti-Nav1.7α ISVDs on stable huNav1.7α-rhNav1.7α chimera cell line CHO FlpIn Nav1.7α(R277Q)+β1−β2−β3.

[0083] FIG. 22E shows binding FACS of extracellular anti-Nav1.7α ISVDs on stable huNav1.7α-rhNav1.7α chimera cell line CHO FlpIn Nav1.7α(E281V)+β1−β2−β3.

[0084] FIG. 22F shows binding FACS of extracellular anti-Nav1.7α ISVDs on stable huNav1.7α-rhNav1.7α chimera cell line CHO FlpIn Nav1.7α(V331M)+β1−β2−β3.

[0085] FIG. 22G shows a schematic representation of the extracellular polymorphisms between huNav1.7α and rhNav1.7α on an huNav1.7α model viewed from the extracellular side.

[0086] FIG. 23A shows a schematic illustrating the IonFlux 16 single pulse protocol.

[0087] FIG. 23B shows a schematic illustrating the IonFlux 16 two pulse protocol.

[0088] FIG. 24A shows an IonFlux 16 dose response titration of F0103265B04, F0103362B08, F0103387G04 and F0103387G05 using the single pulse (P1) protocol.

[0089] FIG. 24B shows an IonFlux 16 dose response titration of F0103265B04, F0103362B08, F0103387G04 and F0103387G05 using two pulse (P2) protocol.

[0090] FIG. 25A shows an IonFlux 16 single high concentration dose response for F0103265B04, F0103275B05, and F0103262CO2 in HEK huNav1.7α+β1 cells using single pulse (P1) and two pulse (P2) protocols.

[0091] FIG. 25B shows an IonFlux 16 single high concentration dose response for F0103265B04, F0103275B05, and F0103262CO2 in HEK huNav1.7α cells using single pulse (P1) and two pulse (P2) protocols.

[0092] FIG. 25C shows an IonFlux 16 single high concentration dose response for F0103265B04, F0103275B05, and F0103262CO2 in CHO FlpIn huNav1.7α+β1−β2−β3 cells using single pulse (P1) and two pulse (P2) protocols.

[0093] FIG. 25D shows an IonFlux 16 single high concentration dose response for F0103262B06, F0103265A11, and F0103265B04 in CHO FlpIn huNav1.7α+β1−β2−β3 cells using single pulse (P1) and two pulse (P2) protocols.

[0094] FIG. 25E shows an IonFlux 16 single high concentration dose response for F0103262B06, F0103265A11, and F0103265B04 in HEK FlpIn huNav1.7α+β1−β2−β3 cells using single pulse (P1) and two pulse (P2) protocols.

[0095] FIG. 26 shows the results of an IonFlux 16 washout experiment using F0103265B04.

[0096] FIG. 27 shows the results of an IonFlux 16 time course experiment using F0103265B04.

[0097] FIG. 28 shows a sequence analysis of F0103275B05 (SEQ ID NO: 50) and F010387G04 (SEQ ID NO: 52) compared to the human VH3-JH consensus sequence (SEQ ID NO: 57), VHH2 consensus sequence (SEQ ID NO: 58), and sequenced optimized F0103387G04 (F0103387G04 SO; SEQ ID NO:59).

[0098] FIG. 29 shows a sequence analysis of F0103387G05 (SEQ ID NO: 53) compared to the human VH3-JH consensus sequence (SEQ ID NO: 57), VHH2 consensus sequence (SEQ ID NO: 58), and sequenced optimized F0103387G05 (F0103387G05_SO; SEQ ID NO:60).

[0099] FIG. 30 shows the Tm of F0103387G05 variants in function of pH. Dotted lines mark variants with H37Y substitution (see Table 30).

[0100] FIG. 31 shows a sequence analysis of F0103464B09 (SEQ ID NO: 55) compared to the human VH3-JH consensus sequence (SEQ ID NO: 57), VHH2 consensus sequence (SEQ ID NO: 58), and sequenced optimized F01034647B09 (F01034647B09_SO; SEQ ID NO:61).

[0101] FIG. 32 shows a schematic diagram of huNav1.7α. VSD=voltage sensing domain; PM=pore module; D=domain; S=transmembrane segment.

[0102] FIG. 33 shows results of a binding FACS of anti-Navβ2 ISVD F0103240B04 on stable cell lines.

[0103] FIG. 34A shows results of a binding ELISA of the shown anti-Navβ ISVDs binding to Navβ1. F0103240B04 is a potent anti-Navβ2 binder control and IRR022 is a negative control comprising an irrelevant binder. F0103478E09 weakly binds Navβ1.

[0104] FIG. 34B shows results of a binding ELISA of the shown anti-Navβ ISVDs binding to 132. F0103240B04 is a potent anti-Navβ2 binder control and IRR0022 is a negative control comprising an irrelevant binder. F0103492E09, F0103500E03, and F0103505D08 weakly bind 132.

[0105] FIG. 34C shows results of a binding ELISA of the shown anti-Navβ ISVDs binding to Navβ3. F0103240B04 is a potent anti-Navβ2 binder control and IRR0202 is a negative control comprising an irrelevant binder. None of the ISVDs bind Navβ3.

[0106] FIG. 35A, FIG. 35B, FIG. 35C, and FIG. 35D together show results of binding FACS of the shown anti-Navβ subunit ISVDs (12.3 nM) on transiently transfected cells. Positive controls anti-Navβ1, anti-Navβ2, and anti-Navβ3 are rabbit polyclonal antibodies specific for human Navβ1, Navβ2, and Navβ3, respectively.

[0107] FIG. 36A shows results of binding FACS of anti-Navβ ISVD F0103478E09 on various stable cell lines.

[0108] FIG. 36B shows results of binding FACS of anti-Navβ ISVD F0103492E09 on various stable cell lines.

[0109] FIG. 36C shows results of binding FACS of anti-Navβ ISVD F0103500E03 on various stable cell lines.

[0110] FIG. 36D shows results of binding FACS of anti-Navβ ISVD F0103505D08 on various stable cell lines.

[0111] FIG. 36E shows results of binding FACS of anti-Navβ ISVD F0103495D09 on various stable cell lines.

[0112] FIG. 37A shows the results of a competition FACS of Nav1.7α-Navβ bispecific ISVDs on stable CHO cell lines expressing human Nav1.7α-Navβ1-Navβ2-Navβ3 (Nav1.7-β1-β2-β3).

[0113] FIG. 37B shows the results of a competition FACS of Nav1.7α-Navβ bispecific ISVDs on stable CHO cell lines expressing rhesus Nav1.7α-Navβ1-Navβ2-Navβ3 (Nav1.7-β1-β2-β3).

[0114] FIG. 38A shows the results of a competition FACS of Nav1.7α-Navβ bispecific ISVDs on stable HEK cell lines expressing human Nav1.7α (Nav1.7).

[0115] FIG. 38B shows the results of a competition FACS of Nav1.7α-Navβ bispecific ISVDs on stable HEK cell lines human expressing Nav1.7α-Navβ1 (Nav1.7-β1).

[0116] FIG. 38C shows the results of a competition FACS of Nav1.7α-Navβ bispecific ISVDs on stable HEK cell lines expressing human Nav1.7α-Navβ1-Navβ2-Navβ3 (Nav1.7-β1-β2-β3).

[0117] FIG. 39A shows binding FACS of Nav1.7 binder F0103262C02 on stable huNav1.x paralog HEK293T cell lines. MFI=median fluorescence intensity; a-FLAG is a detection moiety.

[0118] FIG. 39B shows binding FACS of Nav1.7 binder F0103265B04 on stable huNav1.x paralog HEK293T cell lines. MFI=median fluorescence intensity; a-FLAG is a detection moiety.

[0119] FIG. 39C shows binding FACS of Nav1.7 binder F0103275B05 on stable huNav1.x paralog HEK293T cell lines. MFI=median fluorescence intensity; a-FLAG is a detection moiety.

[0120] FIG. 39D shows binding FACS of Nav1.7 binder F0103464B09 on stable huNav1.x paralog HEK293T cell lines. MFI=median fluorescence intensity; a-FLAG is a detection moiety.

[0121] FIG. 39E shows binding FACS of Nav1.7 binder F0103387G05 on stable huNav1.x paralog HEK293T cell lines. MFI=median fluorescence intensity; a-FLAG is a detection moiety.

### DETAILED DESCRIPTION OF THE INVENTION

### Definitions

[0122] As used herein, the term “Nav1.7 binder” refers to an antibody, an antibody fragment, an immunoglobulin single variable domain (also referred to as “ISV” or ISVD″) or single domain antibody (also referred to as “sdAb”) that binds to Nav1.7α. An example of an ISVD is a Nanobody® molecule.

[0123] As used herein, the term “Navβ binder” refers to an antibody, an antibody fragment, an immunoglobulin single variable domain (also referred to as “ISV” or ISVD″) or single domain antibody (also referred to as “sdAb”) that binds to Navβ. The term “Navβ” comprises the terms “Navβ1” and “Navβ2”.

[0124] As used herein, “antibody” refers to an entire immunoglobulin, including recombinantly produced forms and includes any form of antibody that exhibits the desired biological activity. Thus, it is used in the broadest sense and specifically covers, but is not limited to, monoclonal antibodies (including full length monoclonal antibodies), polyclonal antibodies, multispecific antibodies (e.g., bispecific antibodies), humanized antibodies, fully human antibodies, biparatopic antibodies, and chimeric antibodies. “Parental antibodies” are antibodies obtained by exposure of an immune system to an antigen prior to modification of the antibodies for an intended use, such as humanization of a non-human antibody for use as a human therapeutic antibody.

[0125] The term “antibody” refers, in one embodiment, to a conventional antibody, which is a protein tetramer comprising two heavy chains (HCs) and two light chains (LCs) inter-connected by disulfide bonds, or an antigen binding portion thereof, and in another embodiment, to a nonconventional antibody, which is a heavy chain antibody protein dimer comprising two heavy chains inter-connected by disulfide bonds and no light chains, or antigen binding portion thereof. In either embodiment, each heavy chain is comprised of a heavy chain variable region or domain (abbreviated herein as V_{H}) and a heavy chain constant region or domain. In certain naturally occurring IgG, IgD and IgA antibodies, the heavy chain constant region is comprised of three domains, C_{H}1, C_{H}2 and C_{H}3. In certain naturally occurring antibodies, each light chain is comprised of a light chain variable region or domain (abbreviated herein as V_{L}) and a light chain constant region or domain. The light chain constant region is comprised of one domain, CL. The human V_{H} includes six family members: V_{H}1, V_{H}2, V_{H}3, V_{H}4, V_{H}5, and V_{H}6 and the human V_{L} family includes 16 family members: V_{κ}1, V_{κ}2, V_{κ}3, V_{κ}4, V_{κ}5, V_{κ}6, V_{λ}1, V_{λ}2, V_{λ}3, V_{λ}4, V_{λ}5, V_{λ}6, V_{λ}7, V_{λ}8, V_{λ}9, and V_{λ}10. Each of these family members can be further divided into particular subtypes.

[0126] The V_{H} and V_{L} regions can be further subdivided into regions of hypervariability, termed complementarity determining regions (CDR), interspersed with regions that are more conserved, termed framework regions (FR). Each V_{H} and V_{L} is composed of three CDRs and four FRs, arranged from amino-terminus to carboxy-terminus in the following order: FR1, CDR1, FR2, CDR2, FR3, CDR3, FR4. The CDRs form a binding domain that interacts with an antigen. The constant regions of the antibodies may mediate the binding of the immunoglobulin to host tissues or factors, including various cells of the immune system (e.g., effector cells) and the first component (C1q) of the classical complement system.

[0127] The constant domains or regions of the antibodies may mediate the binding of the immunoglobulin to host tissues or factors, including various cells of the immune system (e.g., effector cells) and the first component (C1q) of the classical complement system. Typically, the numbering of the amino acids in the heavy chain constant domain begins with number 118, which is in accordance with the Eu numbering scheme. The Eu numbering scheme is based upon the amino acid sequence of human IgG₁ (Eu), which has a constant domain that begins at amino acid position 118 of the amino acid sequence of the IgG₁ described in Edelman et al., Proc. Natl. Acad. Sci. USA. 63: 78-85 (1969), and is shown for the IgG₁, IgG₂, IgG₃, and IgG₄ constant domains in Beranger, et al., Ibid.

[0128] The variable domains or regions of the heavy and light chains contain a binding domain comprising the CDRs that interacts with an antigen. A number of methods are available in the art for defining or predicting the CDR amino acid sequences of antibody variable domains (see Dondelinger et al., Frontiers in Immunol. 9: Article 2278 (2018)). The common numbering schemes include the following.
[0129] Kabat numbering scheme is based on sequence variability and is the most commonly used (See Kabat et al. Sequences of Proteins of Immunological Interest, 5th Ed. Public Health Service, National Institutes of Health, Bethesda, Md. (1991) (defining the CDR regions of an antibody by sequence); Chothia numbering scheme is based on the location of the structural loop region (See
[0130] Chothia & Lesk J. Mol. Biol. 196: 901-917 (1987); Al-Lazikani et al., J. Mol. Biol. 273: 927-948 (1997));
[0131] AbM numbering scheme is a compromise between the two used by Oxford Molecular's
[0132] AbM antibody modelling software (see Karu et al, ILAR Journal 37: 132-141 (1995);
[0133] Contact numbering scheme is based on an analysis of the available complex crystal structures (See www.bioinf.org.uk: Prof Andrew C. R. Martin's Group; Abhinandan & Martin, Mol. Immunol. 45:3832-3839 (2008).
[0134] IMGT (ImMunoGeneTics) numbering scheme is a standardized numbering system for all the protein sequences of the immunoglobulin superfamily, including variable domains from antibody light and heavy chains as well as T cell receptor chains from different species and counts residues continuously from 1 to 128 based on the germ-line V sequence alignment (see Giudicelli et al., Nucleic Acids Res. 25:206-11 (1997); Lefranc, Immunol Today 18:509(1997); Lefranc et al., Dev Comp Immunol. 27:55-77 (2003)).
   While there are several different methods for determining the amino acid sequences of the CDRs, the numbering of the entire variable region typically follows the Kabat numbering scheme with the particular CDR numbering scheme imposed thereupon.

[0135] The following general rules disclosed in www.bioinforg.uk: Prof. Andrew C. R. Martin's Group and reproduced in Table 1 below may be used to define or predict the CDRs in an antibody sequence that includes those amino acids that specifically interact with the amino acids comprising the epitope in the antigen to which the antibody binds. There are rare examples where these generally constant features do not occur; however, the Cys residues are the most conserved feature.

TABLE 1

| Loop | Kabat | AbM | Chothia¹ | Contact² | IMGT |
|---|---|---|---|---|---|
| L1 | L24--L34 | L24--L34 | L24--L34 | L30--L36 | L27--L32 |
| L2 | L50--L56 | L50--L56 | L50--L56 | L46--L55 | L50--L52 |
| L3 | L89--L97 | L89--L97 | L89--L97 | L89--L96 | L89--L97 |
| H1 | H31--H35B | H26--H35B | H26--H32 . . . 34 | H30--H35B | H26--H35B |
| | (Kabat Numbering)³ | | | | |
| H1 | H31--H35 | H26--H35 | H26--H32 | H30--H35 | H26--H33 |
| | (Chothia Numbering) | | | | |
| H2 | H50--H65 | H50--H58 | H52--H56 | H47--H58 | H51--H56 |
| H3 | H95--H102 | H95--H102 | H95--H102 | H93--H101 | H93--H102 |

¹Some of these numbering schemes (particularly for Chothia loops) vary depending on the individual publication examined.
²Any of the numbering schemes can be used for these CDR definitions, except the Contact numbering scheme uses the Chothia or Martin (Enhanced Chothia) definition.
³The end of the Chothia CDR-H1 loop when numbered using the Kabat numbering convention varies between H32 and H34 depending on the length of the loop. (This is because the Kabat numbering scheme places the insertions at H35A and H35B.)
If neither H35A nor H35B is present, the loop ends at H32
If only H35A is present, the loop ends at H33
If both H35A and H35B are present, the loop ends at H34

[0136] In general, the state of the art recognizes that in many cases, the CDR3 region of the heavy chain is the primary determinant of antibody specificity, and examples of specific antibody generation based on CDR3 of the heavy chain alone are known in the art (e.g., Beiboer et al., J. Mol. Biol. 296: 833-849 (2000); Klimka et al., British J. Cancer 83: 252-260 (2000); Rader et al., Proc. Natl. Acad. Sci. USA 95: 8910⁻⁸⁹¹⁵ (1998); Xu et al., Immunity 13: 37-45 (2000).

[0137] A conventional antibody tetramer includes two identical pairs of polypeptide chains, each pair having one “light” (about 25 kDa) and one “heavy” chain (about 50-70 kDa). The amino-terminal portion of each chain includes a variable region of about 100 to 110 or more amino acids primarily responsible for antigen recognition. The carboxy-terminal portion of the heavy chain may define a constant region primarily responsible for effector function. Typically, human light chains are classified as kappa and lambda light chains. Furthermore, human heavy chains are typically classified as mu, delta, gamma, alpha, or epsilon, and define the antibody's isotype as IgM, IgD, IgG, IgA, and IgE, respectively. Within light and heavy chains, the variable and constant regions are joined by a “J” region of about 12 or more amino acids, with the heavy chain also including a “D” region of about 10 more amino acids. See generally, Fundamental Immunology Ch. 7 (Paul, W., ed., 2nd ed. Raven Press, N.Y. (1989).

[0138] The heavy chain of a conventional antibody may or may not contain a terminal lysine (K), or a terminal glycine and lysine (GK).

[0139] As used herein, “antigen binding fragment” or “antigen binding portion” refers to fragments of antibodies, i.e. antibody fragments that retain the ability to bind specifically to the antigen bound by the full-length antibody, e.g. fragments that retain one or more CDR regions. Examples of antibody binding fragments include, but are not limited to, Fab, Fab′, F(ab′)₂, and Fv fragments; diabodies; single-chain antibody molecules, e.g., sc-Fv; immunoglobulin single variable domain molecules, and multispecific antibodies formed from antibody fragments.

[0140] As used herein, the term “immunoglobulin single variable domain” (also referred to as “ISV” or ISVD″) or “single domain antibody (also referred to as “sdAb”) are terms that are used to refer to immunoglobulin variable domains (which may be heavy chain or light chain domains, including VH, VHH, or VL domains) that can form a functional antigen-binding site without interaction with another variable domain (e.g., without a VH/VL interaction as is required between the VH and VL domains of a conventional four-chain monoclonal antibody). The term “VH” refers to a heavy chain variable domain of a conventional antibody and the term “VHH” refers to the heavy chain variable domain of a non-conventional heavy chain antibody.

[0141] Examples of ISVDs include for example, VHHs, humanized VHHs, and/or a camelized VHs such as camelized human VHs), IgNAR domains, single domain antibodies such as dAbs™, which are VH domains or are derived from a VH domain or are VL domains or are derived from a VL domain. ISVDs that are based on and/or derived from heavy chain variable domains (such as VH or VHH domains) are generally preferred. Most preferably, an ISVD will be a VHH, a humanized VHH, or a camelized VH (such as a camelized human VH) or generally a sequence optimized VHH (e.g., optimized for chemical stability and/or solubility, maximum overlap with known human framework regions and maximum expression).

[0142] The term “Nanobody® molecule” is generally as defined in WO 2008/020079 or WO 2009/138519, and thus in a specific aspect denotes an VHH, a humanized VHH, or a camelized VH (such as a camelized human VH) or generally a sequence optimized VHH (such as, e.g., optimized for chemical stability and/or solubility, maximum overlap with known human framework regions and maximum expression). The term Nanobody® is a registered trademark of Ablynx N.V.

[0143] As used herein, “Nav1.7 binder” refers to a conventional antibody, heavy chain antibody, antigen binding fragment of an antibody or ISVD that binds to Nav1.7α. A Nav1.7 binder may be part of a larger molecule such as a multivalent, bispecific, or multispecific binder that includes one or more Nav1.7 binders and may include one or more binders to a target other than Nav1.7α (e.g., Navβ binder) and may comprises another functional element, such as, for example, a half-life extender (HLE), an Fc domain of an immunoglobulin, a targeting unit and/or a small molecule such a polyethylene glycol (PEG).

[0144] As used herein, “Navβ binder” refers to a conventional antibody, heavy chain antibody, antigen binding fragment of an antibody or ISVD that binds to Navβ1 or Navβ2. A Navβ binder may be part of a larger molecule such as a multivalent, bispecific, or multispecific binder that includes one or more Navβ binders and may include one or more binders to a target other than Navβ1 or Navβ2 (e.g., a Nav1.7 binder) and may comprise another functional element, such as, for example, a half-life extender (HLE), an Fc domain of an immunoglobulin, a targeting unit and/or a small molecule such as a PEG. Monovalent, monospecific and/or biparatopic Nav1.7 or Navβ binders are part of the present invention. A monovalent Nav1.7 or Navβ binder (e.g., ISVD such as a Nanobody® molecule) is a molecule that comprises a single antigen-binding domain. A bivalent or bispecific Nav1.7 binder (e.g., ISVD such as a Nanobody® molecule) comprises two antigen-binding domains, e.g., a Nav1.7-Navβ bispecific binder. A multivalent or multispecific Nav1.7 binder comprises more than one antigen-binding domain (e.g., 1, 2, 3, 4, 5, 6, or 7). When a multivalent or multispecific binder comprises only two antigen binding domains it may be referred to as a bispecific or bivalent binder.

[0145] For a general description of multivalent and multispecific polypeptides containing one or more ISVDs and their preparation, reference is also made to Conrath et al., J. Biol. Chem., Vol. 276, 10. 7346-7350, 2001; Muyldermans, Reviews in Molecular Biotechnology 74 (2001), 277-302; as well as to for example WO 1996/34103, WO 1999/23221, WO 2004/041862, WO 2006/122786, WO 2008/020079, WO 2008/142164 or WO 2009/068627.

[0146] As used herein, a “Fab fragment” is comprised of one light chain and the C_{H}1 and variable regions of one heavy chain. The heavy chain of a Fab molecule cannot form a disulfide bond with another heavy chain molecule. A “Fab fragment” can be the product of papain cleavage of an antibody.

[0147] As used herein, a “Fab′ fragment” contains one light chain and a portion or fragment of one heavy chain that contains the VH domain and the C_{H}1 domain and also the region between the C_{H}1 and C_{H}2 domains, such that an interchain disulfide bond can be formed between the two heavy chains of two Fab′ fragments to form a F(ab′)₂ molecule.

[0148] As used herein, a “F(ab′)₂ fragment” contains two light chains and two heavy chains containing the V_{H} domain and a portion of the constant region between the C_{H}1 and C_{H}2 domains, such that an interchain disulfide bond is formed between the two heavy chains. An F(ab′)₂ fragment thus is composed of two Fab′ fragments that are held together by a disulfide bond between the two heavy chains. An “F(ab′)₂ fragment” can be the product of pepsin cleavage of an antibody.

[0149] As used herein, an “Fv region” comprises the variable regions from both the heavy and light chains but lacks the constant regions.

[0150] These and other potential constructs are described at Chan & Carter (2010) Nat. Rev. Immunol. 10:301. These antibody fragments are obtained using conventional techniques known to those with skill in the art, and the fragments are screened for utility in the same manner as are intact antibodies. Antigen-binding fragments can be produced by recombinant DNA techniques, or by enzymatic or chemical cleavage of intact immunoglobulins.

[0151] As used herein, an “Fc domain” or “Fc region” each refer to the fragment crystallizable region of an antibody. The Fc domain comprises two heavy chain fragments comprising the C_{H}1 and C_{H}2 domains of an antibody. The two heavy chain fragments are held together by two or more disulfide bonds and by hydrophobic interactions of the C_{H}3 domains. The Fc domain may be fused at the N-terminus or the C-terminus to a heterologous protein.

[0152] As used herein, a “diabody” refers to a small antibody fragment with two antigen-binding regions, which fragments comprise a heavy chain variable domain (V_{H}) connected to a light chain variable domain (V_{L}) in the same polypeptide chain (V_{H}-V_{L} or V_{L}-V_{H}). By using a linker that is too short to allow pairing between the two domains on the same chain, the domains are forced to pair with the complementarity domains of another chain and create two antigen-binding regions. Diabodies are described more fully in, e.g., EP 404,097; WO 93/11161; and Holliger et al. (1993) Proc. Natl. Acad. Sci. USA 90: 6444-6448. For a review of engineered antibody variants generally see Holliger and Hudson (2005) Nat. Biotechnol. 23:1126-1136.

[0153] As used herein, “isolated” antibodies or antigen-binding fragments thereof (e.g., Nav1.7 and Navβ binders) are at least partially free of other biological molecules from the cells or cell cultures in which they are produced. Such biological molecules include nucleic acids, proteins, lipids, carbohydrates, or other material such as cellular debris and growth medium. An isolated antibody or antigen-binding fragment may further be at least partially free of expression system components such as biological molecules from a host cell or of the growth medium thereof. Generally, the term “isolated” is not intended to refer to a complete absence of such biological molecules or to an absence of water, buffers, or salts or to components of a pharmaceutical formulation that includes the antibodies or fragments.

[0154] As used herein, a “monoclonal antibody” refers to a population of substantially homogeneous antibodies, i.e., the antibody molecules comprising the population are identical in amino acid sequence except for possible naturally occurring mutations that may be present in minor amounts. In contrast, conventional (polyclonal) antibody preparations typically include a multitude of different antibodies having different amino acid sequences in their variable domains that are often specific for different epitopes. The modifier “monoclonal” indicates the character of the antibody as being obtained from a substantially homogeneous population of antibodies, and is not to be construed as requiring production of the antibody by any particular method. For example, the monoclonal antibodies to be used in accordance with the present invention may be made by the hybridoma method first described by Kohler et al. (1975) Nature 256: 495, or may be made by recombinant DNA methods (see, e.g., U.S. Pat. No. 4,816,567). The “monoclonal antibodies” may also be isolated from phage antibody libraries using the techniques described in Clackson et al. (1991) Nature 352: 624-628 and Marks et al. (1991)J Mol. Biol. 222: 581-597, for example. See also Presta (2005) J. Allergy Clin. Immunol. 116:731.

[0155] As used herein, a “humanized ISVD” or “humanized antibody” refers to forms of Nav1.7 binders that contain sequences from both human and non-human (e.g., llama, murine, rat) antibodies. In general, the humanized Nav1.7 and Navβ binders will comprise all of at least one, and typically two, variable domains, in which the hypervariable loops correspond to those of a non-human immunoglobulin, and all or substantially all of the framework (FR) regions are those of a human immunoglobulin sequence. The humanized Nav1.7 and/or Navβ binder may optionally comprise at least a portion of a human immunoglobulin constant region (Fc).

[0156] “Humanization” (also called Reshaping or CDR-grafting) is now a well-established technique for reducing the immunogenicity of monoclonal antibodies (mAbs) from xenogeneic sources (commonly rodent or camelids) and for improving the effector functions (ADCC, complement activation, C1q binding). The engineered mAb is engineered using the techniques of molecular biology, however simple CDR-grafting of the rodent complementarity-determining regions (CDRs) into human frameworks often results in loss of binding affinity and/or specificity of the original mAb. In order to humanize an antibody, the design of the humanized antibody includes variations such as conservative amino acid substitutions in residues of the CDRs, and back substitution of residues from the rodent mAb into the human framework regions (backmutations). The positions can be discerned or identified by sequence comparison for structural analysis or by analysis of a homology model of the variable regions' 3D structure. The process of affinity maturation has most recently used phage libraries to vary the amino acids at chosen positions. Similarly, many approaches have been used to choose the most appropriate human frameworks in which to graft the rodent CDRs. As the datasets of known parameters for antibody structures increases, so does the sophistication and refinement of these techniques. Consensus or germline sequences from a single antibody or fragments of the framework sequences within each light or heavy chain variable region from several different human mAbs can be used. Another approach to humanization is to modify only surface residues of the rodent sequence with the most common residues found in human mAbs and has been termed “resurfacing” or “veneering.” Known human Ig sequences are disclosed, e.g.,
[0157] www.ncbi.nlm.nih.gov/entrez/query.fcgi; www.ncbi.nih.gov/igblast;
[0158] www.atcc.org/phage/hdb.html; www.kabatdatabase.com/top.html;
[0159] www.antibodyresource.com/onlinecomp.html; www.appliedbiosystems.com;
[0160] www.biodesign.com; antibody.bath.ac.uk; www.unizh.ch; www.cryst.bbk.ac.uk/.about.ubcgO7s; Kabat et al., Sequences of Proteins of Immunological Interest, U.S. Dept. Health (1983), each entirely incorporated herein by reference. Often, the human or humanized antibody is substantially non-immunogenic in humans.

[0161] As used herein, “non-human amino acid sequences” with respect to antibodies or immunoglobulins refers to an amino acid sequence that is characteristic of the amino acid sequence of a non-human mammal. The term does not include amino acid sequences of antibodies or immunoglobulins obtained from a fully human antibody library where diversity in the library is generated in silico (See for example, U.S. Pat. No. 8,877,688 or 8,691,730).

[0162] As used herein, “effector functions” refer to those biological activities attributable to the Fc region of an antibody, which vary with the antibody isotype. Examples of antibody effector functions include: C1q binding and complement dependent cytotoxicity (CDC); Fc receptor binding; antibody-dependent cell-mediated cytotoxicity (ADCC); phagocytosis; down regulation of cell surface receptors (e.g. B cell receptor); and B cell activation.

[0163] As used herein, “conservatively modified variants” or “conservative substitution” refers to substitutions of amino acids with other amino acids having similar characteristics (e.g. charge, side-chain size, hydrophobicity/hydrophilicity, backbone conformation and rigidity, etc.), such that the changes can frequently be made without altering the biological activity of the protein. Those of skill in this art recognize that, in general, single amino acid substitutions in non-essential regions of a polypeptide do not substantially alter biological activity (see, e.g., Watson et al. (1987) Molecular Biology of the Gene, The Benjamin/Cummings Pub. Co., p. 224 (4th Ed.)). In addition, substitutions of structurally or functionally similar amino acids are less likely to disrupt biological activity. Exemplary conservative substitutions are set forth in the table below.

| Original residue | Conservative substitution |
|---|---|
| Ala (A) | Gly; Ser |
| Arg (R) | Lys; His |
| Asn (N) | Gln; His |
| Asp (D) | Glu; Asn |
| Cys (C) | Ser; Ala |
| Gln (Q) | Asn |
| Glu (E) | Asp; Gln |
| Gly (G) | Ala |
| His (H) | Asn; Gln |
| Ile (I) | Leu; Val |
| Leu (L) | Ile; Val |
| Lys (K) | Arg; His |
| Met (M) | Leu; Ile; Tyr |
| Phe (F) | Tyr; Met; Leu |
| Pro (P) | Ala |
| Ser (S) | Thr |
| Thr (T) | Ser |
| Trp (W) | Tyr; Phe |
| Tyr (Y) | Trp; Phe |
| Val (V) | Ile; Leu |

[0164] As used herein, the term “epitope” or “antigenic determinant” refers to a site on an antigen (e.g., Nav1.7α, Navβ1, Navβ2) to which a binder specifically binds. Epitopes within protein antigens can be formed both from contiguous amino acids (usually a linear epitope) or noncontiguous amino acids juxtaposed by tertiary folding of the protein (usually a conformational epitope). Epitopes formed from contiguous amino acids are typically, but not always, retained on exposure to denaturing solvents, whereas epitopes formed by tertiary folding are typically lost on treatment with denaturing solvents. A contiguous linear epitope comprises a peptide domain on an antigen comprising at least 3, 4, 5, 6, 7, 8, 9, 10, 11, 12, 13, 14 or 15 amino acids. A noncontiguous conformational epitope comprises one or more peptide domains or regions on antigen bound by a binder interspersed by one or more amino acids or peptide domains not bound by the binder, each domain independently comprises at least 3, 4, 5, 6, 7, 8, 9, 10, 11, 12, 13, 14 or 15 amino acids. Methods for determining what epitopes are bound by a given binder (i.e., epitope mapping) are well known in the art and include, for example, immunoblotting and immunoprecipitation assays, wherein overlapping or contiguous peptides (e.g., from Nav1.7α, Navβ1, Navβ2) are tested for reactivity with a given binder. Methods of determining spatial conformation of epitopes include techniques in the art and those described herein, for example, x-ray crystallography, 2-dimensional nuclear magnetic resonance, and HDX-MS (see, e.g., Epitope Mapping Protocols in Methods in Molecular Biology, Vol. 66, G. E. Morris, Ed. (1996)).

[0165] The term “epitope mapping” refers to the process of identification of the molecular determinants on the antigen involved in antibody-antigen recognition.

[0166] The term “binds to the same epitope” with reference to two or more binders means that the binders bind to the same segment of amino acid residues on a target, as determined by a given method. Techniques for determining whether a particular binder binds to the “same epitope” as the Nav1.7 or Navβ binders described herein include, for example, epitope mapping methods, such as, x-ray analyses of crystals of Nav1.7α:Nav1.7 binder or Navβ:Navβ binder complexes, which provides atomic resolution of the epitope, and hydrogen/deuterium exchange mass spectrometry (HDX-MS). Other methods that monitor the binding of the antibody to antigen fragments (e.g. proteolytic fragments) or to mutated variations of the antigen where loss of binding due to a modification of an amino acid residue within the antigen sequence is often considered an indication of an epitope component (e.g. alanine scanning mutagenesis—Cunningham & Wells (1985) Science 244:1081). In addition, computational combinatorial methods for epitope mapping can also be used. These methods rely on the ability of the binder of interest to affinity isolate specific short peptides from combinatorial phage display peptide libraries.

[0167] Binders that “compete with a binder of the present invention for binding to a target antigen” refer to binders that inhibit (partially or completely) the binding of the Nav1.7 binder of the present invention to Nav1.7α or Navβ binder to Navβ. Whether two binders compete with each other for binding to the target antigen, i.e., whether and to what extent one binder inhibits the binding of the other binder to the target antigen, may be determined using known competition experiments. In certain embodiments, a binder competes with, and inhibits binding of a binder of the present invention to the target antigen by at least 10%, 20%, 30%, 40%, 50%, 60%, 70%, 80%, 90% or 100%. The level of inhibition or competition may be different depending on which binder is the “blocking binder” (i.e., the unlabeled binder that is incubated first with the target antigen). Competition assays can be conducted as described, for example, in Ed Harlow and David Lane, Cold Spring Harb Protoc; 2006; doi:10.1101/pdb.prot4277 or in Chapter 11 of “Using Antibodies” by Ed Harlow and David Lane, Cold Spring Harbor Laboratory Press, Cold Spring Harbor, N.Y., USA 1999. Competing Nav1.7 binders bind to the same epitope as defined herein.

[0168] Other competitive binding assays include: solid phase direct or indirect radioimmunoassay (RIA), solid phase direct or indirect enzyme immunoassay (EIA), sandwich competition assay (see Stahli et al., Methods in Enzymology 9:242 (1983)); solid phase direct biotin-avidin EIA (see Kirkland et al., J. Immunol. 137:3614 (1986)); solid phase direct labeled assay, solid phase direct labeled sandwich assay (see Harlow and Lane, Antibodies: A Laboratory Manual, Cold Spring Harbor Press (1988)); solid phase direct label RIA using 1-125 label (see Morel et al., Mol. Immunol. 25(1):7 (1988)); solid phase direct biotin-avidin EIA (Cheung et al., Virology 176:546 (1990)); and direct labeled RIA. (Moldenhauer et al., Scand. J. Immunol. 32:77 (1990)).

[0169] As used herein, “specifically binds” refers, with respect to a target antigen, to the preferential association of a binder, in whole or part, with the target antigen and not to other molecules, particularly molecules found in human blood or serum. Binders as shown herein typically bind specifically to the target antigen with high affinity, reflected by a dissociation constant (K_{D}) of 10⁻⁷ to 10⁻¹¹ M or less. Any K_{D} greater than about 10⁻⁶ M is generally considered to indicate nonspecific binding. As used herein, a binder that “specifically binds” or “binds specifically” to a target antigen refers to a binder that binds to the target antigen with high affinity, which means having a K_{D} of 10⁻⁷ M or less, in particular embodiments a K_{D} of 10⁻⁸ M or less, or 5×10⁻⁹ M or less, or between 10⁻⁸ M and 10⁻¹¹ M or less, but does not bind with measurable binding to closely related proteins such as human Nav1.1α, human Nav1.2α, human Nav1.3a, humanNav.1.4α, human Nav1.5α, human Nav 1.6α, or human Nav1.8α as determined in a cell ELISA or Surface Plasmon Resonance assay (SPR; Biacore) using 10 μg/mL antibody.

[0170] As used herein, an antigen is “substantially identical” to a given antigen if it exhibits a high degree of amino acid sequence identity to the given antigen, for example, if it exhibits at least 80%, at least 90%, at least 95%, at least 97%, or at least 99% or greater amino acid sequence identity to the amino acid sequence of the given antigen. By way of example, an antibody that binds specifically to human Nav1.7α or Navβ may also cross-react with Nav1.7α or Navβ from certain non-human primate species (e.g., rhesus monkey or cynomolgus monkey). The term specifically excludes human Nav1.1α, human Nav1.2α, human Nav1.3a, humanNav.1.4α, human Nav1.5α, human Nav 1.6α, and human Nav1.8a.

[0171] As used herein, “isolated nucleic acid molecule” means a DNA or RNA of genomic, mRNA, cDNA, or synthetic origin or some combination thereof which is not associated with all or a portion of a polynucleotide in which the isolated polynucleotide is found in nature, or is linked to a polynucleotide to which it is not linked in nature. For purposes of this disclosure, it should be understood that “a nucleic acid molecule comprising” a particular nucleotide sequence does not encompass intact chromosomes. Isolated nucleic acid molecules “comprising” specified nucleic acid sequences may include, in addition to the specified sequences, coding sequences for up to ten or even up to twenty or more other proteins or portions or fragments thereof, or may include operably linked regulatory sequences that control expression of the coding region of the recited nucleic acid sequences, and/or may include vector sequences.

[0172] As used herein, “treat” or “treating” means to administer a therapeutic agent, such as a composition containing any of the Nav1.7 and/or Navβ binders of the present invention, topically, subcutaneously, intramuscular, intradermally, or systemically to an individual experiencing chronic pain. The amount of a therapeutic agent that is effective to alleviate chronic pain in the individual may vary according to factors such as the injury or disease state, age, and/or weight of the individual, and the ability of the therapeutic agent to elicit a desired response in the individual. Whether chronic pain has been alleviated can be assessed by the individual and/or any clinical measurement typically used by physicians or other skilled healthcare providers to assess the severity or progression status of chronic pain. Thus, the terms denote that a beneficial result has been or will be conferred on a human or animal individual experiencing chronic pain.

[0173] As used herein, “treatment,” as it applies to a human or veterinary individual, refers to therapeutic treatment, as well as diagnostic applications. “Treatment” as it applies to a human or veterinary individual, encompasses contact of the antibodies or antigen binding fragments of the present invention to a human or animal subject.

[0174] As used herein, “therapeutically effective amount” refers to a quantity of a specific substance sufficient to achieve a desired effect in an individual being treated. For instance, this may be the amount necessary to inhibit or reduce the severity of chronic pain in an individual.

[0175] As used herein, the term “effector-silent” as used herein refers to an antibody, antibody fragment, HC constant domain, or Fc domain thereof that displays (i) no measurable binding to one or more Fc receptors (FcRs) as may be measured in a surface plasmon resonance (SPR) assay (e.g., Biacore™ assay) wherein an association constant in the micromolar range indicates no measurable binding or (ii) measurable binding to one or more FcRs as may be measured in SPR assay that is reduced compared to the binding that is typical for an antibody, antibody fragment, HC constant domain or Fc domain thereof the same isotype. In particular embodiments, the antibody, antibody fragment, HC constant domain, or Fc domain thereof may comprise one or more mutations in the HC constant domain and the Fc domain in particular such that the mutated an antibody, antibody fragment, HC constant domain or Fc domain thereof has reduced or no measurable binding to FcγRIIIa, FcγRIIa, and FcγRI compared to a wild-type antibody of the same isotype as the mutated antibody. In particular embodiments, the affinity or association constant of an effector-silent an antibody, antibody fragment, HC constant domain or Fc domain thereof to one or more of FcγRIIIa, FcγRIIa, and FcγRI is reduced by at least 1000-fold compared to the affinity of the wild-type isotype; reduced by at least 100-fold to 1000-fold compared to the affinity of the wild-type isotype reduced by at least 50-fold to 100-fold compared to the affinity of the wild-type isotype; or at least 10-fold to 50-fold compared to the affinity of the wild-type isotype. In particular embodiments, the effector-silent an antibody, antibody fragment, HC constant domain, or Fc domain thereof has no detectable or measurable binding to one or more of the FcγRIIIa, FcγRIIa, and FcγRI as compared to binding by the wild-type isotype. In general, effector-silent an antibody, antibody fragment, HC constant domain, or Fc domain thereof will lack measurable antibody-dependent cell-mediated cytotoxicity (ADCC) activity. An ISVD not fused or linked to an effector-silent HC constant domain or Fc domain thereof displays no detectable or measurable binding to one or more of FcγRIIIa, FcγRIIa, or FcγRI. SPR assays measure binding of an effector-silent antibody, antibody fragment, HC constant domain or Fc domain thereof, against human FcRs.

### INTRODUCTION

[0176] Patients with loss of function mutations in the gene encoding the Nav1.7α channel (SCN9A) show profound insensitivity to pain from birth on. In contrast, gain of function mutations can result in chronic pain disorders. Nav1.7α channels predominantly expressed in peripheral C-fiber nociceptors are therefore a drug target of great interest for treatment of various pain conditions. We have identified ISVDs (Nav1.7 binders) that inhibit Nav1.7α channels with exquisite selectivity over other Nav channel paralogs. Functional inhibitory Nav1.7 activity of the Nav1.7 binders was assessed in automated in vitro patch clamp assays. IC₅₀ values in the nanomolar range have been measured. In vivo target modulation in the tissue of interest (peripheral C-fiber nociceptors) was demonstrated in Rhesus microneurography assays. The potential advantages of injectable Nav1.7 binders for the treatment of chronic pain syndromes, such as painful diabetic peripheral neuropathy and osteoarthritis pain, are specificity and extended half-life. Clinical differentiation will be based on improved or comparable efficacy with better side effect profile versus standard of care.

[0177] In an embodiment of the invention, any Nav1.7 binder or other binder as set forth herein comprises, where applicable, a substitution of the amino acid at position 11 to the amino acid V and a substitution of the amino acid at position 89 to the amino acid L. In further embodiments, the Nav1.7 binder further includes a substitution of the amino acid at position 110 to the amino acid T, K, or Q. In further embodiments, the amino acid at position 112 is substituted with the amino acid S, K or Q. In each case wherein the numbering is according to the Kabat numbering scheme.

### Nav1.7 Sodium Ion Channel

[0178] The α-subunits of the Nav1.7 channel are polypeptide chains of 1977 amino acids that are folded into four homologous (but not identical) domains termed DI-DIV that are linked by three intracellular loops (L1-L3). Each domain has six transmembrane segments (S1-S6) with S1-S4 in each domain comprising a voltage sensing domain (VSD), and S5-S6 together with their extracellular linker (including the P-loop) included in the pore domain (PD) (Catterall (2000) Neuron 26:13-25; Guy & Seetharamulu (1986) Proceedings of the National Academy of Sciences of the United States of America 83: 508-512; Noda et al. (1984) Nature 312:121-127). Thus, each α-subunit has four distinct VSDs and four PDs which assemble to form one sodium-selective pore. Sodium is selectivity achieved in the extracellular portion of the pore domain by tight association of the four P-loops that re-enter the membrane between the S5 and S6 segments in DI-DIV and includes several negatively charged residues (aspartic acid and glutamic acid) (Catterall 2000). The human Nav1.7α comprises the amino acid sequence set forth in SEQ ID NO: 1. Domain I of the human Nav1.7α consists of the amino acid sequence shown in SEQ ID NO: 63 and the Domain I S5-S6 loop is shown in SEQ ID NO: 64. The amino acid sequence for the rhesus monkey NAV1.7α is shown in SEQ ID NO: 2, which has 99% identity with the human Nav1.7α. A schematic representation of Nav1.7α is shown in FIG. 32.

### Nav1.7 Binders

[0179] The present invention provides Nav1.7 binders (e.g., ISVDs) that bind to Nav1.7α and methods of use of the binders for or in the treatment or prevention of disease. In an embodiment of the Nav1.7 binders, the Nav1.7 binders are antagonistic anti-NaV1.7α ISVDs. In further embodiments, the Nav1.7 binder antagonizes the activity of the Nav1.7 channel, for example, by blocking the channel, which may be by physically blocking or closing the Nav1.7 pore to Na⁺ flux or by conformationally changing the Nav1.7 channel to an inactive state.

[0180] The Nav1.7 binders include binders that bind to the Domain I S5-S6 loop of the human Nav1.7α comprising amino acids 276 through 331 thereof (e.g., FRNSLENNETLESIMNTLESEEDFRKYFYYLEGSKDALLCGFSTDSGQCPEGYTCV (SEQ ID NO: 62)), and heteromeric channels in which the Nav1.7α is complexed with one or more beta subunits such as β1, β2,β3, and/or β4. In an embodiment of the invention, the Nav1.7 binder contacts one or more of the following Nav1.7α amino acid residues: F276, R277, E281, and V331 as shown underlined in the amino acid sequence above. In a further embodiment, the Nav1.7 binder contacts the following four Nav1.7α amino acid residues: F276, R277, E281, and V331. Thus, in particular embodiments, the Nav1.7 binders of the present invention bind to an epitope on Nav1.7α comprising amino acid residues F276, R277, E281, and V331. In a further embodiment, the epitope consists of amino acid residues F276, R277, E281, and V331.

[0181] In particular embodiments of the invention, the Nav1.7 binder binds to Nav1.7α having one or more mutations at residue F276, R277, E281, and/or V331 with lower affinity than to human Nav1.7α lacking such mutations. In particular embodiments of the invention, the binder binds to human Nav1.7α comprising one or more mutations at positions Q1530, H1531, and E1534 with a substantially similar affinity to that of human Nav1.7α lacking said mutations. In particular embodiments of the invention, the binder binds to human Nav1.7α comprising mutations at positions Q1530, H1531, and E1534 with a substantially similar affinity to that of human Nav1.7α lacking said mutations. In further embodiments of the invention, the Nav1.7 binder does not bind to rhesus monkey Nav1.7α or binds with a lower affinity than to human Nav1.7α.

[0182] In an embodiment of the invention, the Nav1.7 binder binds to human Nav1.7α with substantially similar affinity to human Nav1.7α lacking one more of loops other than the domain 1 S5-S6 loop.

[0183] The Nav1.7 binders of the present invention comprise three complementarity determining regions (CDRs) having amino acid sequences selected from the tables below. The CDR amino acid sequences shown in Table 2 and Table 3 are set forth according to the AbM numbering scheme for defining CDR amino acid sequences. A particular CDR amino acid sequence defined by any one of the other schemes advanced for defining CDR amino acid sequences (See Table 1) may have more or less amino acids than shown for CDR amino acid sequences identified according to the AbM numbering scheme but will overlap the CDR amino acid sequences defined according the AbM numbering scheme. Thus, the CDR amino acid sequences shown herein are not to be construed as limiting and any Nav1.7 binder in which the CDR amino acid sequences have been defined by any other numbering scheme will fall within the scope of the Nav1.7 binders of the present invention provided the amino acid sequences for such Nav1.7 binders comprise the amino acid sequences defined for the three CDR amino acid sequences as shown in Table 2 and Table 3. Thus, regardless of the method used to define the CDRs of a Nav1.7 binder (e.g., Kabat, AbM, Clothia, IMGT, Contact, etc.), any Nav1.7 binder that comprises the three amino acid sequences defined for CDR1, CDR2, and CDR3 for any of the Nav1.7 binders shown in Table 2 and Table 3 are Nav1.7 binders of the present invention.

[0184] The Nav1.7 binders comprise three CDRs and four Frameworks (FR) in the following alignment FR1-CDR1-FR2-CDR2-FR3-CDR3-FR4. The Nav1.7 binder CDRs may comprise CDRs comprising the following amino acid sequences.

TABLE 2

| Nav1.7 binder | CDR1 | CDR2 | CDR3 |
|---|---|---|---|
| F0103262B06 | TRTFSTYAMG | HINFSGSSTRY | ARWVAGPPRYDYEY |
| | (SEQ ID NO: 247) | (SEQ ID NO: 248) | (SEQ ID NO: 249) |
| F0103262C02 | GLPFGLYILG | AISRSGRDTV | DSVPRGTPTITESEYAI |
| | (SEQ ID NO: 250) | (SEQ ID NO: 251) | (SEQ ID NO: 252) |
| F0103265A11 | GMLFNANTQG | FIFSGGYTN | SRY |
| | (SEQ ID NO: 253) | (SEQ ID NO: 254) | |
| F0103265B04 | SFIFSNNYME | RITGRGNTN | LWYGGRA |
| | (SEQ ID NO: 256) | (SEQ ID NO: 257) | (SEQ ID NO: 258) |
| F0103362B08 | VRPFSTSAMG | GILWNGIVTY | DRDYGGRSFSAYEYEY |
| | (SEQ ID NO: 259) | (SEQ ID NO: 260) | (SEQ ID NO: 261) |
| F0103454D07 | GGIININYIA | RISSDDTIK | LITPWTGDTRTY |
| | (SEQ ID NO: 262) | (SEQ ID NO: 263) | (SEQ ID NO: 264) |
| F0103275B05 | GSIFNINSMA | SSTNGGSTN | LLQPSIYDISRTY |
| | (SEQ ID NO: 196) | (SEQ ID NO: 198) | (SEQ ID NO: 200) |
| F0103387G05 | GRILRIGYMR | RITDDSATD | LVTASVRGGSIHSGTY |
| | (SEQ ID NO: 201) | (SEQ ID NO: 202) | (SEQ ID NO: 206) |
| F0103464B09 | SRAFIRDVFTG | RIYNGGNTN | SGTINTGREYRSGDY |
| | (SEQ ID NO: 207) | (SEQ ID NO: 213) | (SEQ ID NO: 219) |
| F0103387G04 | GPVFNINKMA | SVTPTGSIS | LLQPDSYSNTRTY |
| | (SEQ ID NO: 221) | (SEQ ID NO: 223) | (SEQ ID NO: 225) |

[0185] In particular embodiments of the invention, the Nav1.7 binder comprises a CDR1 comprising the amino acid sequence set forth in SEQ ID NO: 247, a CDR2 comprising the amino acid sequence set forth in SEQ ID NO: 248, and a CDR3 comprising the amino acid sequence set forth in SEQ ID NO: 249.

[0186] In particular embodiments of the invention, the Nav1.7 binder comprises a CDR1 comprising the amino acid sequence set forth in SEQ ID NO: 250, a CDR2 comprising the amino acid sequence set forth in SEQ ID NO: 251, and a CDR3 comprising the amino acid sequence set forth in SEQ ID NO: 252.

[0187] In particular embodiments of the invention, the Nav1.7 binder comprises a CDR1 comprising the amino acid sequence set forth in SEQ ID NO: 253, a CDR2 comprising the amino acid sequence set forth in SEQ ID NO: 254, and a CDR3 comprising the amino acid sequence SRY.

[0188] In particular embodiments of the invention, the Nav1.7 binder comprises a CDR1 comprising the amino acid sequence set forth in SEQ ID NO: 256, a CDR2 comprising the amino acid sequence set forth in SEQ ID NO: 257, and a CDR3 comprising the amino acid sequence set forth in SEQ ID NO: 258.

[0189] In particular embodiments of the invention, the Nav1.7 binder comprises a CDR1 comprising the amino acid sequence set forth in SEQ ID NO: 259, a CDR2 comprising the amino acid sequence set forth in SEQ ID NO: 260, and a CDR3 comprising the amino acid sequence set forth in SEQ ID NO: 261.

[0190] In particular embodiments of the invention, the Nav1.7 binder comprises a CDR1 comprising the amino acid sequence set forth in SEQ ID NO: 262, a CDR2 comprising the amino acid sequence set forth in SEQ ID NO: 263, and a CDR3 comprising the amino acid sequence set forth in SEQ ID NO: 264.

[0191] In particular embodiments of the invention, the Nav1.7 binder comprises a CDR1 comprising the amino acid sequence set forth in SEQ ID NO: 196, a CDR2 comprising the amino acid sequence set forth in SEQ ID NO: 198, and a CDR3 comprising the amino acid sequence set forth in SEQ ID NO: 200.

[0192] In particular embodiments of the invention, the Nav1.7 binder comprises a CDR1 comprising the amino acid sequence set forth in SEQ ID NO: 201, a CDR2 comprising the amino acid sequence set forth in SEQ ID NO: 202, and a CDR3 comprising the amino acid sequence set forth in SEQ ID NO: 206.

[0193] In particular embodiments of the invention, the Nav1.7 binder comprises a CDR1 comprising the amino acid sequence set forth in SEQ ID NO: 207, a CDR2 comprising the amino acid sequence set forth in SEQ ID NO: 213, and a CDR3 comprising the amino acid sequence set forth in SEQ ID NO: 219.

[0194] In particular embodiments of the invention, the Nav1.7 binder comprises a CDR1 comprising the amino acid sequence set forth in SEQ ID NO: 221, a CDR2 comprising the amino acid sequence set forth in SEQ ID NO: 223, and a CDR3 comprising the amino acid sequence set forth in SEQ ID NO: 225.

[0195] In a further embodiments of the invention, the Nav1.7 binder comprises three CDRs having an amino acid sequence as set forth in Table 3.

TABLE 3
F0103275B05 Family

| SEQ | | SEQ | | SEQ | |
|---|---|---|---|---|---|
| ID | | ID | | ID | |
| NO: | CDR1 | NO: | CDR2 | NO: | CDR3 |
| 196 | GSIFNINSMA | 198 | SSTNGGSTN | 200 | LLQPSIYDISRTY |
| 197 | GSIFNINRMA | 199 | YSTNGGDTN | | |

F0103387G05 Family

| SEQ | | SEQ | | SEQ | |
|---|---|---|---|---|---|
| ID | | ID | | ID | |
| NO: | CDR1 | NO: | CDR2 | NO: | CDR3 |
| 201 | GRILRIGYMR | 202 | RITDDSATD | 206 | LVTASVRGGSIHSGTY |
| | | 203 | RITGGSATG | | |
| | | 204 | RITDDSATG | | |
| | | 205 | RITGGSATG | | |

F0103464B09 Family

| SEQ | | SEQ | | SEQ | |
|---|---|---|---|---|---|
| ID | | ID | | ID | |
| NO: | CDR1 | NO: | CDR2 | NO: | CDR3 |
| 207 | SRAFIRDVFTG | 213 | RIYNGGNTN | 219 | SGTINTGREYRSGDY |
| 208 | SRAFIRDLFTG | 214 | RIYNEGNTN | | |
| 209 | SRQFIRDVFTG | 215 | RIYNEGNTQ | | |
| 210 | HRQFIRDVFTG | 216 | RIYESGNTQ | | |
| 211 | HRAFIRDVFTG | 217 | RIYESGNTN | | |
| 212 | HRAFIRDLFTG | 218 | RIYNEGNTN | | |

F0103387G04 Family

| SEQ | | SEQ | | SEQ | |
|---|---|---|---|---|---|
| ID | | ID | | ID | |
| NO: | CDR1 | NO: | CDR2 | NO: | CDR3 |
| 221 | GPVFNINKMA | 223 | SVTPTGSIS | 225 | LLQPDSYSNTRTY |
| 222 | GPVFNINRMA | 224 | YVTPTGDIS | 226 | LLQPRRYSNTRTY |
| | | | | 227 | LLQPDSYSITRTY |
| | | | | 228 | LLQPRSYSITRTY |
| | | | | 229 | LLQPRSYSNTRTY |
| | | | | 230 | LLQPSSYSITRTY |
| | | | | 231 | LLQPNVYSITRTY |
| | | | | 232 | LLQPDVYSITRTY |
| | | | | 233 | LLQPSSYSGTRTY |

Amino acid residues in bold face mark those amino acids that are different from the amino acid in the parental sequence.

[0196] In particular embodiments of the invention, the Nav1.7 binder comprises a CDR1 comprising the amino acid sequence set forth in SEQ ID NO: 196 or SEQ ID NO: 197; a CDR2 comprising the amino acid sequence set forth in SEQ ID NO: 198 or SEQ ID NO: 199; and, a CDR3 comprising the amino acid sequence set forth in SEQ ID NO: 200.

[0197] In particular embodiments of the invention, the Nav1.7 binder comprises a CDR1 comprising the amino acid sequence set forth in SEQ ID NO: 201; a CDR2 comprising the amino acid sequence set forth in SEQ ID NO: 202, SEQ ID NO: 203, SEQ ID NO: 204, or SEQ ID NO: 205; and, a CDR3 comprising the amino acid sequence set forth in SEQ ID NO: 206.

[0198] In particular embodiments of the invention, the Nav1.7 binder comprises a CDR1 comprising the amino acid sequence set forth in SEQ ID NO: 207, SEQ ID NO: 208, SEQ ID NO: 209, SEQ ID NO: 210, SEQ ID NO: 211, or SEQ ID NO: 212; a CDR2 comprising the amino acid sequence set forth in SEQ ID NO: 213, SEQ ID NO: 214, SEQ ID NO: 215, SEQ ID NO: 216, SEQ ID NO: 217, or SEQ ID NO: 218; and a CDR3 comprising the amino acid sequence set forth in SEQ ID NO: 219.

[0199] In particular embodiments of the invention, the Nav1.7 binder comprises a CDR1 comprising the amino acid sequence set forth in SEQ ID NO: 201 or SEQ ID NO: 222; a CDR2 comprising the amino acid sequence set forth in SEQ ID NO: 223 or SEQ ID NO: 224; and a CDR3 comprising the amino acid sequence set forth in SEQ ID NO: 225, SEQ ID NO: 226, SEQ ID NO: 227, SEQ ID NO: 228, SEQ ID NO: 229, SEQ ID NO: 230, SEQ ID NO: 231, SEQ ID NO: 232, or SEQ ID NO: 233.

[0200] In a further embodiment of the invention, the Nav1.7 binder comprises a CDR1 comprising the amino acid sequence set forth in SEQ ID NO: 201; a CDR2 comprising the amino acid sequence set forth in SEQ ID NO: 205; and, a CDR3 comprising the amino acid sequence set forth in SEQ ID NO: 206.

[0201] In particular embodiments of the invention, the Nav1.7 binder comprises a CDR1 comprising the amino acid sequence set forth in SEQ ID NO: 211; a CDR2 comprising the amino acid sequence set forth in SEQ ID NO: 215; and, a CDR3 comprising the amino acid sequence set forth in SEQ ID NO: 219.

[0202] In particular embodiments of the invention, the Nav1.7 binder comprises a CDR1 comprising the amino acid sequence set forth in SEQ ID NO: 222; a CDR2 comprising the amino acid sequence set forth in SEQ ID NO: 223; and, a CDR3 comprising the amino acid sequence set forth in SEQ ID NO: 233.

[0203] As recited above, the Nav1.7 binders comprise four frameworks: FR1, FR2, FR3, and FR4 wherein the Nav1.7 binder is a single polypeptide having the structure beginning from the N-terminus FR1-CDR1-FR2-CDR2-FR3-CDR3-FR4. The numbering of the frameworks may be as shown herein be according to the Kabat numbering scheme and the junction between each framework and a CDR may be defined according to the AbM numbering scheme as shown herein. In particular embodiments, the Nav1.7 binders comprise the VHH2-consensus frameworks FR1, FR2, FR3, and FR4, wherein FR1 has the amino acid sequence set forth in SEQ ID NO: 268, FR2 has the amino acid sequence set forth in SEQ ID NO: 269, FR3 has the amino acid sequence set forth in SEQ ID NO: 270, and FR4 has the amino acid sequence set forth in SEQ ID NO: 271. In further embodiments, each framework may comprise one or more substitutions and or insertions with the proviso that the Nav1.7 binder is capable of binding human Nav1.7α. In further embodiments, frameworks may comprise one or more of the substitutions and/or insertions shown in Table 4 in any combination. In further embodiments, FR1 may comprise one or more of the substitutions shown for FR1 in Table 4. In further embodiments, FR2 may comprise one or more of the substitutions shown for FR2 in Table 4. In further embodiments, FR3 may comprise one or more of the substitutions shown for FR3 in Table 4. In further embodiments, FR4 may comprise one of the substitutions shown for FR4 in Table 4. In a further embodiment, each framework comprises at least one amino acid substitution. In a further embodiment, the Nav1.7 binder comprises at least one substitution and/or insertion shown in Table 4 for each of FR1, FR2, FR3, and FR4. In a further embodiment, the Nav1.7 binder comprises the one substitution or specific substitution and/or insertion combination shown in Table 4 for each of FR1, FR2, FR3, and FR4.

[0204] In particular embodiments, the ISVD framework comprises one or more substitutions to minimize binding to pre-existing antibodies. Pre-existing antibodies are antibodies existing in the body of a patient prior to receipt of an ISVD and are immunoglobulins mainly of the IgG class that are present in varying degrees in up to 50% of the human population and that bind to critical residues clustered at the C-terminal region of ISVDs. The ISVDs of the present invention are based, in part, in llama antibodies whose C-terminal constant domains have been removed; thus, exposing the neo-epitopes in the C-terminus of the resulting VHH to pre-existing antibody binding. It has been discovered that the combination of mutations of residues 11 and 89 (e.g., L11V and I89L or V89L) led to a surprising lack of pre-existing antibody binding. Mutations in residue 112 have also been shown to remarkably reduce pre-existing antibody binding. Buyse & Boutton (WO2015/173325) included data showing that the combination of an L11V and V89L mutation provided a remarkable improvement in reducing pre-existing antibody binding compared to an L11V mutation alone or a V89L mutation alone. For example, Table H of Buyse & Boutton on page 97 showed comparative data for an ISVD with a V89L mutation alone (with or without C-terminal extension) and the same ISVD with a V89L mutation in combination with an L11V mutation (again, with or without a C-terminal extension). Also, although generated in two separate experiments, the data shown in Table H for the L11V/V89L combination as compared to the data given in Table B for an L11V mutation alone (in the same ISVD) showed that the pre-existing antibody binding reduction that is obtained by the L11V/V89L combination was greater than that for the L11V mutation alone. Since the llama antibody scaffold structure is known to be very highly conserved, the effect of the mutations at positions 11 and 89 is very likely to exist for any ISVD. Thus, in embodiments herein, the ISVD comprises at least the L11V/V89L substitutions in the framework regions.

[0205] In a further embodiment, FR1 comprises at least an L11V substitution and FR3 comprises at least a V89L substitution. In a further still embodiment, the Nav1.7 binder may comprise one of the 125 specific sets of FR1, FR2, FR3, and FR4 combinations shown in Table 4. In any one of the above embodiments, the FR1 may further comprise a Q1E or a Q1D amino acid substitution.

TABLE 4

| # | FR1 | FR2 | FR3 | FR4 |
|---|---|---|---|---|
| 1 | NC | NC | N93R | NC |
| 2 | L11V | R39Q | T83R, V89L | NC |
| 3 | L11V | NC | R76N, T83R, V89L | NC |
| 4 | L11V | NC | T83R, V89L | NC |
| 5 | L11V | R39Q | R76N, T83R, V89L | NC |
| 6 | L11V | R39Q | R76_V78insT, T83R, V89L | NC |
| 7 | L11V | NC | R76_V78insT, T83R, V89L | NC |
| 8 | L11V | NC | R76_V78insT, R76N, | NC |
| | | | T83R, V89L | |
| 9 | L11V | R39Q | R76_V78insT, R76N, | NC |
| | | | T83R, V89L | |
| 10 | L11V | NC | R76N, T83R, V89L, N93R | NC |
| 11 | L11V | NC | T83R, V89L, N93R | NC |
| 12 | L11V | R39Q | T83R, V89L, N93R | NC |
| 13 | L11V | R39Q | R76N, T83R, V89L, N93R | NC |
| 14 | D23A | NC | NC | NC |
| 15 | D23A | NC | NC | NC |
| 16 | L11V, A14P, | G40A, A41P | N82bS, N83R, V89L | R105Q |
| | D23A | | | |
| 17 | L11V, A14P, | H37Y, G40A, | N82bS, N83R, V89L | R105Q |
| | D23A | A41P | | |
| 18 | L11V, A14P, | NC | N82bS, N83R, V89L | R105Q |
| | D23A | | | |
| 19 | L11V, A14P | H37Y, | N82bS, N83R, V89L | R105Q |
| 20 | L11V, A14P | G40A | N82bS, N83R, V89L, | R105Q |
| | L11V, A14P | A41P | N82bS, N83R, V89L | R105Q |
| 21 | L11V, A14P | F47L | N82bS, N83R, V89L, | R105Q |
| 22 | L11V, A14P | NC | N82bS, N83R, V89L, E93N | R105Q |
| 23 | L11V, A14P | NC | N82bS, N83R, V89L | R105Q |
| 24 | L11V, A14P, | H37Y, G40A, | N73A, N82bS, N83R, | R105Q |
| | D23A | A41P | V89L | |
| 25 | L11V, A14P, | H37Y, G40A, | N73Y, N82bS, N83R, | R105Q |
| | D23A | A41P | V89L | |
| 26 | L11V, A14P, | H37Y, G40A, | N73Q, N82bS, N83R, | R105Q |
| | D23A | A41P | V89L | |
| 27 | L11V, A14P, | H37Y, G40A, | N82bS, N83R, V89L | R105Q |
| | D23A | A41P | | |
| 28 | L11V, A14P, | H37Y, G40A, | N73Q, N82bS, N83R, | R105Q |
| | D23A | A41P | V89L | |
| 29 | L11V, | NC | S68T, T79Y, R81Q, S82aN, | NC |
| | | | N82bS, K83R, G88A, | |
| | | | V89L | |
| 30 | L11V, | NC | S68T, M77T, T79Y, R81Q, | NC |
| | | | S82aN, N82bS, K83R, | |
| | | | G88A, V89L | |
| 31 | L11V, | NC | S68T, T79Y, R81Q, S82aN, | NC |
| | | | N82bS, K83R, G88A, | |
| | | | V89L, L93N | |
| 32 | L11V, T24A | NC | S68T, T79Y, R81Q, S82aN, | NC |
| | | | N82bS, K83R, G88A, | |
| | | | V89L | |
| 33 | L11V, T25S | NC | S68T, T79Y, R81Q, S82aN, | NC |
| | | | N82bS, K83R, G88A, | |
| | | | V89L | |
| 34 | L11V | R39Q | S68T, T79Y, R81Q, S82aN, | NC |
| | | | N82bS, K83R, G88A, | |
| | | | V89L | |
| 35 | L11V | V40A | S68T, T79Y, R81Q, S82aN, | NC |
| | | | N82bS, K83R, G88A, | |
| | | | V89L | |
| 36 | L11V | NC | F62S, S68T, T79Y, R81Q, | NC |
| | | | S82aN, N82bS, K83R, | |
| | | | G88A, V89L | |
| 37 | L11V | NC | A63V, S68T, T79Y, R81Q, | NC |
| | | | S82aN, N82bS, K83R, | |
| | | | G88A, V89L | |
| 38 | | NC | L11V, S68T, K76N, T79Y, | NC |
| | | | R81Q, S82aN, N82bS, | |
| | | | K83R, G88A, V89L | |
| 39 | L11V | E44Q | S68T, T79Y, R81Q, S82aN, | NC |
| | | | N82bS, K83R, G88A, | |
| | | | V89L | |
| 40 | L11V | NC | K83R, V89L | NC |
| 41 | L11V | NC | S68T, K83R, V89L | NC |
| 42 | L11V | NC | M77T, K83R, V89L | NC |
| 43 | L11V | NC | T79Y, K83R, V89L | NC |
| 44 | L11V | NC | R81Q, K83R, V89L | NC |
| 45 | L11V | NC | S82aN, K83R, V89L | NC |
| 46 | L11V | NC | N82bS, K83R, V89L | NC |
| 47 | L11V | NC | K83R, G88A, V89L | NC |
| 48 | L11V, T24A, | V40A, E44Q | F62S, S68T, M77T, T79Y, | NC |
| | T25S | | R81Q, S82aN, N82bS, | |
| | | | K83R, G88A, V89L | |
| 49 | L11V, T24A, | V40A, E44Q | F62S, S68T, M77T, T79Y, | NC |
| | T25S | | R81Q, S82aN, N82bS, | |
| | | | K83R, G88A, V89L | |
| 50 | L11V, T24A, | V40A, E44Q | F62S, S68T, M77T, T79Y, | NC |
| | T25S | | R81Q, S82aN, N82bS, | |
| | | | K83R, G88A, V89L | |
| 51 | L11V, T24A, | V40A, E44Q | F62S, S68T, M77T, T79Y, | NC |
| | T25S | | R81Q, S82aN, N82bS, | |
| | | | K83R, G88A, V89L | |
| 52 | L11V, T24A, | V40A, E44Q | F62S, S68T, M77T, T79Y, | NC |
| | T25S | | R81Q, S82aN, N82bS, | |
| | | | K83R, G88A, V89L | |
| 53 | L11V, T24A, | V40A, E44Q | F62S, S68T, M77T, T79Y, | NC |
| | T25S | | R81Q, S82aN, N82bS, | |
| | | | K83R, G88A, V89L | |
| 54 | L11V, T24A, | V40A, E44Q, | F62S, S68T, M77T, T79Y, | NC |
| | T25S | | R81Q, S82aN, N82bS, | |
| | | | K83R, G88A, V89L | |
| 55 | L11V, T24A, | V40A, E44Q | F62S, S68T, M77T, T79Y, | NC |
| | T25S | | R81Q, S82aN, N82bS, | |
| | | | K83R, G88A, V89L | |
| 56 | L11V, T24A, | R39Q, V40A, | F62S, S68T, M77T, T79Y, | NC |
| | T25S | E44Q | R81Q, S82aN, N82bS, | |
| | | | K83R, G88A, V89L | |
| 57 | L11V, T24A, | R39Q, V40A, | F62S, S68T, M77T, T79Y, | NC |
| | T25S | E44Q | R81Q, S82aN, N82bS, | |
| | | | K83R, G88A, V89L | |
| 58 | L11V, T24A, | R39Q, V40A, | F62S, S68T, M77T, T79Y, | NC |
| | T25S | E44Q | R81Q, S82aN, N82bS, | |
| | | | K83R, G88A, V89L | |
| 59 | L11V, T24A, | R39Q, V40A, | F62S, S68T, M77T, T79Y, | NC |
| | T25S | E44Q | R81Q, S82aN, N82bS, | |
| | | | K83R, G88A, V89L | |
| 60 | L11V, T24A, | R39Q, V40A, | F62S, S68T, M77T, T79Y, | NC |
| | T25S | E44Q | R81Q, S82aN, N82bS, | |
| | | | K83R, G88A, V89L | |
| 61 | L11V, T24A, | R39Q, V40A, | F62S, S68T, M77T, T79Y, | NC |
| | T25S | E44Q | R81Q, S82aN, N82bS, | |
| | | | K83R, G88A, V89L | |
| 62 | L11V, T24A, | R39Q, V40A, | F62S, S68T, M77T, T79Y, | NC |
| | T25S | E44Q | R81Q, S82aN, N82bS, | |
| | | | K83R, G88A, V89L | |
| 63 | L11V, T24A, | R39Q, V40A, | F62S, S68T, M77T, T79Y, | NC |
| | T25S | E44Q | R81Q, S82aN, N82bS, | |
| | | | K83R, G88A, V89L | |
| 64 | L11V, T24A, | V40A, E44Q | F62S, A63V, S68T, M77T, | NC |
| | T25S | | T79Y, R81Q, S82aN, | |
| | | | N82bS, K83R, G88A, | |
| | | | V89L | |
| 65 | L11V, T24A, | V40A, E44Q | F62S, A63V, S68T, M77T, | NC |
| | T25S | | T79Y, R81Q, S82aN, | |
| | | | N82bS, K83R, G88A, | |
| | | | V89L | |
| 66 | L11V, T24A, | V40A, E44Q | F62S, A63V, S68T, M77T, | NC |
| | T25S | | T79Y, R81Q, S82aN, | |
| | | | N82bS, K83R, G88A, | |
| | | | V89L | |
| 67 | L11V, T24A, | V40A, E44Q | F62S, A63V, S68T, M77T, | NC |
| | T25S | | T79Y, R81Q, S82aN, | |
| | | | N82bS, K83R, G88A, | |
| | | | V89L | |
| 68 | L11V, T24A, | V40A, E44Q | F62S, A63V, S68T, M77T, | NC |
| | T25S | | T79Y, R81Q, S82aN, | |
| | | | N82bS, K83R, G88A, | |
| | | | V89L | |
| 69 | L11V, T24A, | V40A, E44Q | F62S, A63V, S68T, M77T, | NC |
| | T25S | | T79Y, R81Q, S82aN, | |
| | | | N82bS, K83R, G88A, | |
| | | | V89L | |
| 70 | L11V, T24A, | V40A, E44Q | F62S, A63V, S68T, M77T, | NC |
| | T25S | | T79Y, R81Q, S82aN, | |
| | | | N82bS, K83R, G88AV89L | |
| 71 | L11V, T24A, | V40A, E44Q | F62S, A63V, S68T, M77T, | NC |
| | T25S | | T79Y, R81Q, S82aN, | |
| | | | N82bS, K83R, G88A, | |
| | | | V89L | |
| 72 | L11V, T24A, | R39Q, V40A, | F62S, A63V, S68T, M77T, | NC |
| | T25S | E44Q | T79Y, R81Q, S82aN, | |
| | | | N82bS, K83R, G88A, | |
| | | | V89L | |
| 73 | L11V, T24A, | R39Q, V40A, | F62S, A63V, S68T, M77T, | NC |
| | T25S | E44Q | T79Y, R81Q, S82aN, | |
| | | | N82bS, K83R, G88A, | |
| | | | V89L | |
| 74 | L11V, T24A, | R39Q, V40A, | F62S, A63V, S68T, M77T, | NC |
| | T25S | E44Q | T79Y, R81Q, S82aN, | |
| | | | N82bS, K83R, G88A, | |
| | | | V89L | |
| 75 | L11V, T24A, | R39Q, V40A, | F62S, A63V, S68T, M77T, | NC |
| | T25S | E44Q | T79Y, R81Q, S82aN, | |
| | | | N82bS, K83R, G88A, | |
| | | | V89L | |
| 76 | L11V, T24A, | R39Q, V40A, | F62S, A63V, S68T, M77T, | NC |
| | T25S | E44Q | T79Y, R81Q, S82aN, | |
| | | | N82bS, K83R, G88A, | |
| | | | V89L | |
| 77 | L11V, T24A, | R39Q, V40A, | F62S, A63V, S68T, M77T, | NC |
| | T25S | E44Q | T79Y, R81Q, S82aN, | |
| | | | N82bS, K83R, G88A, | |
| | | | V89L | |
| 78 | L11V, T24A, | R39Q, V40A, | F62S, A63V, S68T, M77T, | NC |
| | T25S | E44Q | T79Y, R81Q, S82aN, | |
| | | | N82bS, K83R, G88A, | |
| | | | V89L | |
| 79 | L11V, T24A, | R39Q, V40A, | F62S, A63V, S68T, M77T, | NC |
| | T25S | E44Q | T79Y, R81Q, S82aN, | |
| | | | N82bS, K83R, G88A, | |
| | | | V89L | |
| 80 | L11V, T24A, | V40A, E44Q | F62S, S68T, M77T, T79Y, | NC |
| | T25S | | R81Q, S82aN, N82bS, | |
| | | | K83R, G88A, V89L | |
| 81 | L11V, T24A, | R39Q, V40A, | F62S, S68T, M77T, T79Y, | NC |
| | T25S | E44Q | R81Q, S82aN, N82bS, | |
| | | | K83R, G88A, V89L | |
| 82 | L11V, T24A, | V40A, E44Q | F62S, A63V, S68T, M77T, | NC |
| | T25S | | T79Y, R81Q, S82aN, | |
| | | | N82bS, K83R, G88A, | |
| | | | V89L | |
| 83 | L11V, T24A, | R39Q, V40A, | F62S, A63V, S68T, M77T, | NC |
| | T25S | E44Q | T79Y, R81Q, S82aN, | |
| | | | N82bS, K83R, G88A, | |
| | | | V89L | |
| 84 | | | N93R | |
| 85 | L11V, A12V | R39Q | R76_V78insT, T83R, | NC |
| | | | V89L, N93R | |
| 86 | L11V, A12V | R39Q | T83R, V89L, N93R | NC |
| 87 | L11V, A12V | R39Q | T60A, T83R, V89L, N93R | NC |
| 88 | L11V, A12V | R39Q | G73N, T83R, V89L, N93R | NC |
| 89 | L11V, A12V | R39Q | R76N, T83R, V89L, N93R | NC |
| 90 | L11V, A12V | R39Q | W78V, T83R, V89L, N93R | NC |
| 91 | L11V, A12V | R39Q | S79Y, T83R, V89L, N93R | NC |
| 92 | L11V, A12V | R39Q | T60A, G73N, R76N, | NC |
| | | | W78V, S79Y, T83R, V89L, | |
| | | | N93R | |
| 93 | L11V, A12V | R39Q | T60A, G73N, W78V, | NC |
| | | | S79Y, T83R, V89L, N93R | |
| 94 | L11V, A12V | R39Q | T60A, W78V, S79Y, T83R, | NC |
| | | | V89L, N93R | |
| 95 | L11V, A12V | R39Q | T60A, R76N, W78V, S79Y, | NC |
| | | | T83R, V89L, N93R | |
| 96 | L11V, A12V | R39Q | T60A, G73A, W78V, | NC |
| | | | S79Y, T83R, V89L, N93R | |
| 97 | L11V, A12V | R39Q | T60A, G73R, W78V, S79Y, | NC |
| | | | T83R, V89L, N93R | |
| 98 | L11V, A12V | R39Q | T60A, W78V, S79Y, T83R, | NC |
| | | | V89L, N93R, | |
| 99 | L11V, A12V | R39Q | T60A, G73A, W78V, | NC |
| | | | S79Y, T83R, V89L, N93R | |
| 100 | L11V, A12V | R39Q | T60A, G73R, W78V, S79Y, | NC |
| | | | T83R, V89L, N93R, | |
| 101 | L11V, A12V | R39Q | T60A, W78V, S79Y, T83R, | NC |
| | | | V89L, N93R | |
| 102 | L11V, A12V | R39Q | T60A, G73A, W78V, | NC |
| | | | S79Y, T83R, V89L, N93R | |
| 103 | L11V, A12V | R39Q | T60A, G73R, W78V, S79Y, | NC |
| | | | T83R, V89L, N93R | |
| 104 | L11V, A12V | R39Q | T60A, W78V, S79Y, T83R, | NC |
| | | | V89L, N93R | |
| 105 | L11V, A12V | R39Q | T60A, G73A, W78V, | NC |
| | | | S79Y, T83R, V89L, N93R | |
| 106 | L11V, A12V | R39Q | T60A, G73A, W78V, | NC |
| | | | S79Y, T83R, V89L, N93R | |
| 107 | L11V, A12V | R39Q | T60A, G73R, W78V, S79Y, | NC |
| | | | T83R, V89L, N93R | |
| 108 | L11V, A12V | R39Q | T60A, W78V, S79Y, T83R, | NC |
| | | | V89L, N93R | |
| 109 | L11V, A12V | R39Q | T60A, G73A, W78V, | NC |
| | | | S79Y, T83R, V89L, N93R, | |
| 110 | L11V, A12V | R39Q | T60A, G73R, W78V, S79Y, | NC |
| | | | T83R, V89L, N93R | |
| 111 | L11V, A12V | R39Q | T60A, G73R, W78V, S79Y, | NC |
| | | | T83R, V89L, N93R | |
| 112 | L11V, A12V | R39Q | T60A, W78V, S79Y, T83R, | NC |
| | | | V89L, N93R, | |
| 113 | L11V, A12V | R39Q | T60A, G73A, W78V, | NC |
| | | | S79Y, T83R, V89L, N93R | |
| 114 | L11V, A12V | R39Q | T60A, G73R, W78V, S79Y, | NC |
| | | | T83R, V89L, N93R, | |
| 115 | L11V, A12V | R39Q | T60A, W78V, S79Y, T83R, | NC |
| | | | V89L, N93R | |
| 116 | L11V, A12V | R39Q | T60A, G73A, W78V, | NC |
| | | | S79Y, T83R, V89L, N93R, | |
| 117 | L11V, A12V | R39Q | T60A, G73R, W78V, S79Y, | NC |
| | | | T83R, V89L, N93R | |
| 118 | L11V, A12V | R39Q | T60A, W78V, S79Y, T83R, | NC |
| | | | V89L, N93R | |
| 119 | L11V, A12V | R39Q | T60A, G73R, W78V, S79Y, | NC |
| | | | T83R, V89L, N93R | |
| 120 | L11V, A12V | R39Q | T60A, G73R, W78V, S79Y, | NC |
| | | | T83R, V89L, N93R | |
| 121 | L11V, A12V | R39Q | T60A, G73R, W78V, S79Y, | NC |
| | | | T83R, V89L, N93R | |
| 122 | L11V, A12V | R39Q | T60A, D72G, W78V, | NC |
| | | | S79Y, T83R, V89L, N93R | |
| 123 | L11V, A12V | R39Q | T60A, D72G, W78V, | NC |
| | | | S79Y, T83R, V89L, N93R | |
| 124 | L11V, A12V | R39Q | T60A, D72Q, W78V, | NC |
| | | | S79Y, T83R, V89L, N93R | |
| 125 | L11V, A12V | R39Q | T60A, D72Q, W78V, | NC |
| | | | S79Y, T83R, V89L, N93R | |

NC—no substitutions and/or insertions; ins—insertion, e.g., R76_V78insT means an insertion between the R at position 76 and the V at position 78; the position numbers are according to the Kabat numbering scheme and the junction between the frameworks and the CDRs are determined according to the AbM numbering scheme.

[0206] In a further embodiment of the invention, the Nav1.7 binder comprises an amino acid sequence selected from the group consisting of SEQ ID NO: 46, SEQ ID NO: 47, SEQ ID NO: 48, SEQ ID NO: 49, SEQ ID NO: 50, SEQ ID NO: 51, SEQ ID NO: 52, SEQ ID NO: 53, SEQ ID NO: 54, and SEQ ID NO: 55.

[0207] In a further embodiment of the invention, the Nav1.7 binder comprises an amino acid sequence selected from the group consisting of SEQ ID NO: 69, SEQ ID NO: 70, SEQ ID NO: 71, SEQ ID NO: 72, SEQ ID NO: 73, SEQ ID NO: 74, SEQ ID NO: 75, SEQ ID NO: 76, SEQ ID NO: 77, SEQ ID NO: 78, SEQ ID NO: 79, SEQ ID NO: 80, and SEQ ID NO: 81.

[0208] In a further embodiment of the invention, the Nav1.7 binder comprises an amino acid sequence selected from the group consisting of SEQ ID NO: 82, SEQ ID NO: 83, SEQ ID NO: 84, SEQ ID NO: 85, SEQ ID NO: 86, SEQ ID NO: 87, SEQ ID NO: 88, SEQ ID NO: 89, SEQ ID NO: 90, SEQ ID NO: 91, SEQ ID NO: 92, SEQ ID NO: 93, SEQ ID NO: 94, SEQ ID NO: 95, SEQ ID NO: 96, and SEQ ID NO: 97.

[0209] In a further embodiment of the invention, the Nav1.7 binder comprises an amino acid sequence selected from the group consisting of SEQ ID NO: 98, SEQ ID NO: 99, SEQ ID NO: 100, SEQ ID NO: 102, SEQ ID NO: 103, SEQ ID NO: 104, SEQ ID NO: 105, SEQ ID NO: 106, SEQ ID NO: 107, SEQ ID NO: 108, SEQ ID NO: 109, SEQ ID NO: 110, SEQ ID NO: 111, SEQ ID NO: 112, SEQ ID NO: 113, SEQ ID NO: 114, SEQ ID NO: 115, SEQ ID NO: 116, SEQ ID NO: 117, SEQ ID NO: 118, SEQ ID NO: 119, SEQ ID NO: 120, SEQ ID NO: 121, SEQ ID NO: 122, SEQ ID NO: 123, SEQ ID NO: 124, SEQ ID NO: 125, SEQ ID NO: 126, SEQ ID NO: 127, SEQ ID NO: 128, SEQ ID NO: 129, SEQ ID NO: 130, SEQ ID NO: 131, SEQ ID NO: 132, SEQ ID NO: 133, SEQ ID NO: 134, SEQ ID NO: 135, SEQ ID NO: 136, SEQ ID NO: 137, SEQ ID NO: 138, SEQ ID NO: 139, SEQ ID NO: 140, SEQ ID NO: 141, SEQ ID NO: 142, SEQ ID NO: 143, SEQ ID NO: 144, SEQ ID NO: 145, SEQ ID NO: 146, SEQ ID NO: 147, SEQ ID NO: 148, SEQ ID NO: 149, SEQ ID NO: 150, SEQ ID NO: 151, SEQ ID NO: 152, and SEQ ID NO: 153.

[0210] In a further embodiment of the invention, the Nav1.7 binder comprises an amino acid sequence selected from the group consisting of SEQ ID NO: 154, SEQ ID NO: 155, SEQ ID NO: 156, SEQ ID NO: 157, SEQ ID NO: 158, SEQ ID NO: 159, SEQ ID NO: 160, SEQ ID NO: 161, SEQ ID NO: 162, SEQ ID NO: 163, SEQ ID NO: 164, SEQ ID NO: 165, SEQ ID NO: 166, SEQ ID NO: 167, SEQ ID NO: 168, SEQ ID NO: 169, SEQ ID NO: 170, SEQ ID NO: 171, SEQ ID NO: 172, SEQ ID NO: 173, SEQ ID NO: 174, SEQ ID NO: 175, SEQ ID NO: 176, SEQ ID NO: 177, SEQ ID NO: 178, SEQ ID NO: 179, SEQ ID NO: 180, SEQ ID NO: 181, SEQ ID NO: 182, SEQ ID NO: 183, SEQ ID NO: 184, SEQ ID NO: 185, SEQ ID NO: 186, SEQ ID NO: 187, SEQ ID NO: 188, SEQ ID NO: 189, SEQ ID NO: 190, SEQ ID NO: 191, SEQ ID NO: 192, SEQ ID NO: 193, SEQ ID NO: 194, and SEQ ID NO: 195.

[0211] In a further embodiment of the invention, the Nav1.7 binder comprises the amino acid sequence set forth in SEQ ID NO: 96.

[0212] In a further embodiment of the invention, the Nav1.7 binder comprises the amino acid sequence set forth in SEQ ID NO: 148.

[0213] In a further embodiment of the invention, the Nav1.7 binder comprises the amino acid sequence set forth in SEQ ID NO: 192.

[0214] In particular embodiments of the Nav1.7 binders, the N-terminal Glu is substituted with Asp.

[0215] Nav1.7 binders of the invention can be fused or linked to one or more other amino acid sequences, chemical entities or moieties by a peptide or non-peptide linker. These other amino acid sequences, chemical entities or moieties can confer one or more desired properties to the resulting Nav1.7 binders of the invention, for example, to provide the resulting Nav1.7 binders of the invention with affinity against another therapeutically relevant target such that the resulting polypeptide becomes “bispecific” with respect to Nav1.7 and that other therapeutically relevant target), or to provide a desired half-life, to provide a cytotoxic effect and/or to serve as a detectable tag or label. Some non-limiting examples of such other amino acid sequences, chemical entities or moieties are:
[0216] one or more suitable peptide or polypeptide linkers (such as a 9GS, 15GS or 35GS linker (any combination of 9, 15, 20 or 35 G and S amino acids such as, for example, GGGGSGGGS (9GS linker; SEQ ID NO: 243), GGGGSGGGGSGGGGSGGGGS (20GS linker; SEQ ID NO: 244) or GGGGSGGGGSGGGGSGGGGSGGGGSGGGGSGGGGS (35GS linker; SEQ ID NO: 245)), GGGGSGGGGSGGGGSGGGGSGGGGSGGGGSGGGGSGGGGSGGGGSGGGGS (50GS linker; SEQ ID NO: 463) or (GGGGS (SEQ ID NO: 246)) n wherein n is 1, 2, 3,4, 5, 6, 7, 8, 9 or 10); and/or
[0217] one or more binding moieties, directed against a target other than Nav1.7 or epitope thereof, for example, against a different epitope of Nav1.7α, Nav1.1α, Nav1.2α, Nav1.3α, Nav1.4α, Nav1.5α, Nav1.6α, Nav1.8α, Nav1.9α, Na_{X} alpha subunit, a sodium channel beta subunit (e.g., Navβ1, Navβ2, Navβ3, or Navβ4), a calcium channel or a potassium channel); and/or
[0218] one or more binding domains or binding units that provide for an increase in half-life (for example, a binding domain or binding unit that can bind against a serum protein such as serum albumin, e.g., human serum albumin), e.g., ALB11002; See WO200868280; WO2006122787 or WO2012175400 and/or
[0219] a binding domain, binding unit or other chemical entity that allows for the Nav1.7 binder (e.g., an ISVD such as a Nanobody® ISVD) to be internalized into a desired cell (for example, an internalizing anti-EGFR Nanobody® molecule as described in WO05044858); and/or
[0220] a chemical moiety that improves half-life such as a suitable polyethyleneglycol group (i.e. PEGylation) or an amino acid sequence that provides for increased half-life such as human serum albumin or a suitable fragment thereof (i.e. albumin fusion); and/or
[0221] a payload such as a cytotoxic payload; and/or
[0222] a detectable label or tag, such as a radiolabel or fluorescent label; and/or
[0223] a tag that can help with immobilization, detection and/or purification of the binder (e.g., an ISVD such as a Nanobody® ISVD), such as a HISₙ, wherein n is 6 to 18, or FLAG tag or combination thereof (e.g., SEQ ID NO: 56);
[0224] a tag that can be functionalized, such as a C-terminal GGC tag; and/or
[0225] a C-terminal extension X₍ₙ₎ (e.g., -Ala), which may be as further described herein for the Nav1.7 binders (e.g., an ISVD such as a Nanobody® ISVD) of the invention and/or as described in WO12175741 or WO2015173325.

### Sodium Channel Beta Subunit (Navβ) Binders

[0226] The present invention further provides ISVDs that bind the Navβ1 or Navβ2 subunits. These Navβ binders comprise three CDRs having amino acid sequences selected from the table below. The CDR amino acid sequences shown in Table 5 are set forth according to the AbM numbering scheme for defining CDR amino acid sequences. A particular CDR amino acid sequence defined by any one of the other schemes advanced for defining CDR amino acid sequences (See Table 1) may have more or less amino acids than shown for CDR amino acid sequences identified according to the AbM numbering scheme but will overlap the CDR amino acid sequences defined according the AbM numbering scheme. Thus, the CDR amino acid sequences shown herein are not to be construed as limiting and any Navβ binder in which the CDR amino acid sequences have been defined by any other numbering scheme will fall within the scope of the Navβ binders of the present invention provided the amino acid sequences for such Navβ binders comprise the amino acid sequences defined for the three CDR amino acid sequences as shown in Table 5. Thus, regardless of the method used to define the CDRs of a Navβ binder (e.g., Kabat, AbM, Clothia, IMGT, Contact, etc.), any Navβ binder that comprises the three amino acid sequences defined for CDR1, CDR2, and CDR3 for any of the Navβ binders shown in Table 5 are Navβ binders of the present invention.

[0227] The Navβ binders comprise three CDRs and four Frameworks (FR) in the following alignment FR1-CDR1-FR2-CDR2-FR3-CDR3-FR4. The Navβ binder CDRs may comprise CDRs comprising the following amino acid sequences.

TABLE 5

| Navß1 binder | CDR1 | CDR2 | CDR3 |
|---|---|---|---|
| F0103478E09 | GRAFSTLAMG | ISRNGNNS | ISTPSASHPYVRKESYRY |
| | (SEQ ID NO: 425) | (SEQ ID NO: 426) | (SEQ ID NO: 427) |
| F0103495F09 | GRALSTY AMG | RISRSGITT | DASTNPAGYYLRNRYDY |
| | (SEQ ID NO: 437) | (SEQ ID NO: 438) | (SEQ ID NO: 439) |
| Navß2 binder | CDR1 | CDR2 | CDR3 |
| F0103240B04 | GGTGRRYAMGW | AIRWSAMTY | TWDYFKYDQVRAYRG |
| | (SEQ ID NO: 422) | (SEQ ID NO: 423) | (SEQ ID NO: 424) |
| F0103492E09 | KSILSFAYMR | SIAIGGATS | PAGQYR |
| | (SEQ ID NO: 428) | (SEQ ID NO: 429) | (SEQ ID NO: 430) |
| F0103500E09 | GRTFSRYQMG | YISWSGSTR | GTAGIISSRPETYDS |
| | (SEQ ID NO: 431) | (SEQ ID NO: 432) | (SEQ ID NO: 433) |
| F0103505D8 | GRTSDLSTMN | RITRRGSTY | ASEMGYHYR |
| | (SEQ ID NO: 434) | (SEQ ID NO: 435) | (SEQ ID NO: 436) |

[0228] In particular embodiments of the invention, the Navβ1 binder comprises a CDR1 comprising the amino acid sequence set forth in SEQ ID NO: 425, a CDR2 comprising the amino acid sequence set forth in SEQ ID NO: 426, and a CDR3 comprising the amino acid sequence set forth in SEQ ID NO: 427.

[0229] In particular embodiments of the invention, the Navβ1 binder comprises a CDR1 comprising the amino acid sequence set forth in SEQ ID NO: 437, a CDR2 comprising the amino acid sequence set forth in SEQ ID NO: 438, and a CDR3 comprising the amino acid sequence set forth in SEQ ID NO: 439.

[0230] In particular embodiments of the invention, the Navβ2 binder comprises a CDR1 comprising the amino acid sequence set forth in SEQ ID NO: 422, a CDR2 comprising the amino acid sequence set forth in SEQ ID NO: 423, and a CDR3 comprising the amino acid sequence set forth in SEQ ID NO: 424.

[0231] In particular embodiments of the invention, the Navβ2 binder comprises a CDR1 comprising the amino acid sequence set forth in SEQ ID NO: 428, a CDR2 comprising the amino acid sequence set forth in SEQ ID NO: 429, and a CDR3 comprising the amino acid sequence set forth in SEQ ID NO: 430.

[0232] In particular embodiments of the invention, the Navβ2 binder comprises a CDR1 comprising the amino acid sequence set forth in SEQ ID NO: 431, a CDR2 comprising the amino acid sequence set forth in SEQ ID NO: 432, and a CDR3 comprising the amino acid sequence set forth in SEQ ID NO: 433.

[0233] In particular embodiments of the invention, the Navβ2 binder comprises a CDR1 comprising the amino acid sequence set forth in SEQ ID NO: 434, a CDR2 comprising the amino acid sequence set forth in SEQ ID NO: 435, and a CDR3 comprising the amino acid sequence set forth in SEQ ID NO: 436.

[0234] As recited above, the Navβ1 or Navβ2 binders comprise four frameworks: FR1, FR2, FR3, and FR4 wherein the Navβ1 or Navβ2 binder is a single polypeptide having the structure beginning from the N-terminus FR1-CDR1-FR2-CDR2-FR3-CDR3-FR4. The numbering of the frameworks may be as shown herein be according to the Kabat numbering scheme and the junction between each framework and CDR may be determined by the AbM numbering scheme as shown herein. In particular embodiments, the Nav1.7 binders comprise the VHH2-consensus frameworks FR1, FR2, FR3, and FR4, wherein FR1 has the amino acid sequence set forth in SEQ ID NO: 268, FR2 has the amino acid sequence set forth in SEQ ID NO: 269, FR3 has the amino acid sequence set forth in SEQ ID NO: 270, and FR4 has the amino acid sequence set forth in SEQ ID NO: 271. In further embodiments, each framework may comprise one or more substitutions and or insertions with the proviso that the Navβ1 or Navβ2 binder is capable of binding human Nav1.7α. In further embodiments, frameworks may comprise one or more of the substitutions and/or insertions shown in Table 4 in any combination. In further embodiments, FR1 may comprise one or more of the substitutions shown for FR1 in Table 4. In further embodiments, FR2 may comprise one or more of the substitutions shown for FR2 in Table 4. In further embodiments, FR3 may comprise one or more of the substitutions shown for FR3 in Table 4. In further embodiments, FR4 may comprise one of the substitutions shown for FR4 in Table 4. In a further embodiment, each framework comprises at least one amino acid substitution. In a further embodiment, the Navβ1 or Navβ2 binder comprises at least one substitution and/or insertion shown in Table 4 for each of FR1, FR2, FR3, and FR4. In a further embodiment, the Navβ1 or Navβ2 binder comprises the one substitution or specific substitution and/or insertion combination shown in Table 4 for each of FR1, FR2, FR3, and FR4. In a further embodiment, FR1 comprises at least an L11V substitution and FR3 comprises at least a V89L substitution. In a further still embodiment, the Navβ1 or Navβ2 binder may comprise one of the 125 specific sets of FR1, FR2, FR3, and FR4 combinations shown in Table 4. In any one of the above embodiments, the FR1 may further comprise a Q1E or a Q1D amino acid substitution.

[0235] In particular embodiments of the invention, the Navβ1 binder comprises the amino acid sequence set forth in SEQ ID NO: 411.

[0236] In particular embodiments of the invention, the Navβ1 binder comprises the amino acid sequence set forth in SEQ ID NO: 415.

[0237] In particular embodiments of the invention, the Navβ2 binder comprises the amino acid sequence set forth in SEQ ID NO: 410.

[0238] In particular embodiments of the invention, the Navβ2 binder comprises the amino acid sequence set forth in SEQ ID NO: 412.

[0239] In particular embodiments of the invention, the Navβ2 binder comprises the amino acid sequence set forth in SEQ ID NO: 413.

[0240] In particular embodiments of the invention, the Navβ2 binder comprises the amino acid sequence set forth in SEQ ID NO: 414.

[0241] The Navβ binders of the invention can be fused or linked to one or more other amino acid sequences, chemical entities or moieties by a peptide or non-peptide linker. These other amino acid sequences, chemical entities or moieties can confer one or more desired properties to the resulting Navβ binders of the invention, for example, to provide the resulting Navβ binders of the invention with affinity against another therapeutically relevant target such that the resulting polypeptide becomes “bispecific” with respect to Navβ and that other therapeutically relevant target), or to provide a desired half-life, to provide a cytotoxic effect and/or to serve as a detectable tag or label. Some non-limiting examples of such other amino acid sequences, chemical entities or moieties are:
[0242] one or more suitable peptide or polypeptide linkers (such as a 9GS, 15GS or 35GS linker (any combination of 9, 15, 20 or 35 G and S amino acids such as, for example, GGGGSGGGS (9GS linker; SEQ ID NO: 243), GGGGSGGGGSGGGGSGGGGS (20GS linker; SEQ ID NO: 244) or GGGGSGGGGSGGGGSGGGGSGGGGSGGGGSGGGGS (35GS linker; SEQ ID NO: 245)), GGGGSGGGGSGGGGSGGGGSGGGGSGGGGSGGGGSGGGGSGGGGSGGGGS (50GS linker; SEQ ID NO: 463), or (GGGGS (SEQ ID NO: 246)) n wherein n is 1, 2, 3,4, 5, 6, 7, 8, 9 or 10); and/or
[0243] one or more binding moieties, directed against a target other than Navβ or epitope thereof, for example, against a different epitope of Navβ, Nav1.1α, Nav1.2α, Nav1.3α, Nav1.4α, Nav1.5α, Nav1.6α, Nav1.7α, Nav1.8α, Nav1.9α, Na_{X} alpha subunit, a sodium channel beta subunit (e.g., Navβ1, Navβ2, Navβ3, or Navβ4), a calcium channel or a potassium channel); and/or
[0244] one or more binding domains or binding units that provide for an increase in half-life (for example, a binding domain or binding unit that can bind against a serum protein such as serum albumin, e.g., human serum albumin), e.g., ALB11002; See WO200868280; WO2006122787 or WO2012175400 and/or
[0245] a binding domain, binding unit or other chemical entity that allows for the Navβ binder (e.g., an ISVD such as a Nanobody® ISVD) to be internalized into a desired cell (for example, an internalizing anti-EGFR Nanobody® molecule as described in WO05044858); and/or a chemical moiety that improves half-life such as a suitable polyethyleneglycol group (i.e. PEGylation) or an amino acid sequence that provides for increased half-life such as human serum albumin or a suitable fragment thereof (i.e. albumin fusion); and/or
[0246] a payload such as a cytotoxic payload; and/or
[0247] a detectable label or tag, such as a radiolabel or fluorescent label; and/or
[0248] a tag that can help with immobilization, detection and/or purification of the binder (e.g., an ISVD such as a Nanobody® ISVD, such as a HISₙ, wherein n is 6 to 18, or FLAG tag or combination thereof (e.g., SEQ ID NO: 56);
[0249] a tag that can be functionalized, such as a C-terminal GGC tag; and/or
[0250] a C-terminal extension X₍ₙ₎ (e.g., -Ala), which may be as further described herein.

### Nav1.7-Navβ Bispecific Binders

[0251] The present invention further provides Nav1.7-Navβ bispecific binders comprising at least one Nav1.7 binder and at least one Navβ binder linked together by peptide or polypeptide linker. As used herein, Nav1.7-Navβ bispecific binder refers to binders comprising one or more Nav1.7 binders linked to one or more Navβ binders. In an embodiment, the Nav1.7-Navβ bispecific binders comprise a Nav1.7 ISVD linked via a peptide or polypeptide linker at the C-terminus of the Nav1.7 ISVD to the N-terminus of a Navβ ISVD. In another embodiment, the Nav1.7-Navβ bispecific binders comprise a Navβ ISVD linked via a peptide or polypeptide linker at the C-terminus of the Navβ ISVD to the N-terminus of a Nav1.7 ISVD. The Nav1.7-Navβ bispecific binders are provided as a continuous amino acid sequence.

[0252] In particular embodiments, the peptide or polypeptide linker comprises repeating Gly (G) and Ser (S) amino acids to provide for example, 9GS, 15GS, or 35GS peptide or polypeptide linkers (any combination of 9, 15, 20 or 35 G and S amino acids such as, for example, GGGGSGGGS (9GS linker; SEQ ID NO: 243), GGGGSGGGGSGGGGSGGGGS (20GS linker; SEQ ID NO: 244) or GGGGSGGGGSGGGGSGGGGSGGGGSGGGGSGGGGS (35GS linker; SEQ ID NO: 245)), GGGGSGGGGSGGGGSGGGGSGGGGSGGGGSGGGGSGGGGSGGGGSGGGGS (50GS linker; SEQ ID NO: 463), or (GGGGS (SEQ ID NO: 246)) n wherein n is 1, 2, 3,4, 5, 6, 7, 8, 9 or 10).

[0253] In particular embodiments, the N-terminal amino acid of the Nav1.7-Navβ bispecific binders is an Asp or Glu amino acid and the C-terminus of the Nav1.7-Navβ bispecific binders comprises a C-terminal extension of one or more Ala amino acids. In particular embodiments, the C-terminal extension consists of one Ala residue.

[0254] In particular embodiments of the Nav1.7-Navβ1 bispecific binder, the Navβ binder is a Navβ1 binder or a Navβ2 binder.

[0255] In particular embodiments, the Nav1.7-Navβ1 bispecific binder comprises a Navβ1 binder comprising (a) a CDR1 comprising the amino acid sequence set forth in SEQ ID NO: 425, a CDR2 comprising the amino acid sequence set forth in SEQ ID NO: 426, and a CDR3 comprising the amino acid sequence set forth in SEQ ID NO: 427; or (b) a CDR1 comprising the amino acid sequence set forth in SEQ ID NO: 437, a CDR2 comprising the amino acid sequence set forth in SEQ ID NO: 438, and a CDR3 comprising the amino acid sequence set forth in SEQ ID NO: 439.

[0256] In a further embodiment, the Nav1.7-Navβ1 bispecific binder comprises a Navβ1 binder comprising the amino acid sequence set forth in SEQ ID NO: 411 or the amino acid sequence set forth in SEQ ID NO: 415.

[0257] In particular embodiments, the Nav1.7-Navβ2 bispecific binder comprises a Navβ2 binder comprising (a) a CDR1 comprising the amino acid sequence set forth in SEQ ID NO: 422, a CDR2 comprising the amino acid sequence set forth in SEQ ID NO: 423, and a CDR3 comprising the amino acid sequence set forth in SEQ ID NO: 424; (b) a CDR1 comprising the amino acid sequence set forth in SEQ ID NO: 428, a CDR2 comprising the amino acid sequence set forth in SEQ ID NO: 429, and a CDR3 comprising the amino acid sequence set forth in SEQ ID NO: 430; (c) a CDR1 comprising the amino acid sequence set forth in SEQ ID NO: 431, a CDR2 comprising the amino acid sequence set forth in SEQ ID NO: 432, and a CDR3 comprising the amino acid sequence set forth in SEQ ID NO: 433; or (d) a CDR1 comprising the amino acid sequence set forth in SEQ ID NO: 434, a CDR2 comprising the amino acid sequence set forth in SEQ ID NO: 435, and a CDR3 comprising the amino acid sequence set forth in SEQ ID NO: 436.

[0258] In a further embodiment, the Nav1.7-Navβ1 bispecific binder comprises a Navβ2 binder comprising the amino acid sequence set forth in SEQ ID NO: 410, the amino acid sequence set forth in SEQ ID NO: 412, the amino acid sequence set forth in SEQ ID NO: 413, or amino acid sequence set forth in SEQ ID NO: 414.

[0259] In particular embodiments, the Nav1.7-Navβ1 bispecific binder comprises a Nav1.7 binder comprising (a) a CDR1 comprising the amino acid sequence set forth in SEQ ID NO: 196 or SEQ ID NO: 197; a CDR2 comprising the amino acid sequence set forth in SEQ ID NO: 198 or SEQ ID NO: 199; and, a CDR3 comprising the amino acid sequence set forth in SEQ ID NO: 200; (b) a CDR1 comprising the amino acid sequence set forth in SEQ ID NO: 201; a CDR2 comprising the amino acid sequence set forth in SEQ ID NO: 202, SEQ ID NO: 203, SEQ ID NO: 204, or SEQ ID NO: 205; and, a CDR3 comprising the amino acid sequence set forth in SEQ ID NO: 206; (c) a CDR1 comprising the amino acid sequence set forth in SEQ ID NO: 207, SEQ ID NO: 208, SEQ ID NO: 209, SEQ ID NO: 210, SEQ ID NO: 211, or SEQ ID NO: 212; a CDR2 comprising the amino acid sequence set forth in SEQ ID NO: 213, SEQ ID NO: 214, SEQ ID NO: 215, SEQ ID NO: 216, SEQ ID NO: 217, or SEQ ID NO: 218; and a CDR3 comprising the amino acid sequence set forth in SEQ ID NO: 219; (d) a CDR1 comprising the amino acid sequence set forth in SEQ ID NO: 201 or SEQ ID NO: 222; a CDR2 comprising the amino acid sequence set forth in SEQ ID NO: 223 or SEQ ID NO: 224; and a CDR3 comprising the amino acid sequence set forth in SEQ ID NO: 225, SEQ ID NO: 226, SEQ ID NO: 227, SEQ ID NO: 228, SEQ ID NO: 229, SEQ ID NO: 230, SEQ ID NO: 231, SEQ ID NO: 232, or SEQ ID NO: 233; (e) a CDR1 comprising the amino acid sequence set forth in SEQ ID NO: 201; a CDR2 comprising the amino acid sequence set forth in SEQ ID NO: 205; and, a CDR3 comprising the amino acid sequence set forth in SEQ ID NO: 206; (0 a CDR1 comprising the amino acid sequence set forth in SEQ ID NO: 211; a CDR2 comprising the amino acid sequence set forth in SEQ ID NO: 215; and, a CDR3 comprising the amino acid sequence set forth in SEQ ID NO: 219; or (g) a CDR1 comprising the amino acid sequence set forth in SEQ ID NO: 222; a CDR2 comprising the amino acid sequence set forth in SEQ ID NO: 223; and, a CDR3 comprising the amino acid sequence set forth in SEQ ID NO: 233.

[0260] In any one of the foregoing embodiments, the Nav1.7 binder comprising the Nav1.7-Navβ bispecific binder comprises (a) an amino acid sequence selected from the group consisting of SEQ ID NO: 46, SEQ ID NO: 47, SEQ ID NO: 48, SEQ ID NO: 49, SEQ ID NO: 50, SEQ ID NO: 51, SEQ ID NO: 52, SEQ ID NO: 53, SEQ ID NO: 54, and SEQ ID NO: 55; (b) an amino acid sequence selected from the group consisting of SEQ ID NO: 69, SEQ ID NO: 70, SEQ ID NO: 71, SEQ ID NO: 72, SEQ ID NO: 73, SEQ ID NO: 74, SEQ ID NO: 75, SEQ ID NO: 76, SEQ ID NO: 77, SEQ ID NO: 78, SEQ ID NO: 79, SEQ ID NO: 80, and SEQ ID NO: 81; (c) an amino acid sequence selected from the group consisting of SEQ ID NO: 82, SEQ ID NO: 83, SEQ ID NO: 84, SEQ ID NO: 85, SEQ ID NO: 86, SEQ ID NO: 87, SEQ ID NO: 88, SEQ ID NO: 89, SEQ ID NO: 90, SEQ ID NO: 91, SEQ ID NO: 92, SEQ ID NO: 93, SEQ ID NO: 94, SEQ ID NO: 95, SEQ ID NO: 96, and SEQ ID NO: 97; (d) an amino acid sequence selected from the group consisting of SEQ ID NO: 98, SEQ ID NO: 99, SEQ ID NO: 100, SEQ ID NO: 102, SEQ ID NO: 103, SEQ ID NO: 104, SEQ ID NO: 105, SEQ ID NO: 106, SEQ ID NO: 107, SEQ ID NO: 108, SEQ ID NO: 109, SEQ ID NO: 110, SEQ ID NO: 111, SEQ ID NO: 112, SEQ ID NO: 113, SEQ ID NO: 114, SEQ ID NO: 115, SEQ ID NO: 116, SEQ ID NO: 117, SEQ ID NO: 118, SEQ ID NO: 119, SEQ ID NO: 120, SEQ ID NO: 121, SEQ ID NO: 122, SEQ ID NO: 123, SEQ ID NO: 124, SEQ ID NO: 125, SEQ ID NO: 126, SEQ ID NO: 127, SEQ ID NO: 128, SEQ ID NO: 129, SEQ ID NO: 130, SEQ ID NO: 131, SEQ ID NO: 132, SEQ ID NO: 133, SEQ ID NO: 134, SEQ ID NO: 135, SEQ ID NO: 136, SEQ ID NO: 137, SEQ ID NO: 138, SEQ ID NO: 139, SEQ ID NO: 140, SEQ ID NO: 141, SEQ ID NO: 142, SEQ ID NO: 143, SEQ ID NO: 144, SEQ ID NO: 145, SEQ ID NO: 146, SEQ ID NO: 147, SEQ ID NO: 148, SEQ ID NO: 149, SEQ ID NO: 150, SEQ ID NO: 151, SEQ ID NO: 152, and SEQ ID NO: 153; (e) an amino acid sequence selected from the group consisting of SEQ ID NO: 154, SEQ ID NO: 155, SEQ ID NO: 156, SEQ ID NO: 157, SEQ ID NO: 158, SEQ ID NO: 159, SEQ ID NO: 160, SEQ ID NO: 161, SEQ ID NO: 162, SEQ ID NO: 163, SEQ ID NO: 164, SEQ ID NO: 165, SEQ ID NO: 166, SEQ ID NO: 167, SEQ ID NO: 168, SEQ ID NO: 169, SEQ ID NO: 170, SEQ ID NO: 171, SEQ ID NO: 172, SEQ ID NO: 173, SEQ ID NO: 174, SEQ ID NO: 175, SEQ ID NO: 176, SEQ ID NO: 177, SEQ ID NO: 178, SEQ ID NO: 179, SEQ ID NO: 180, SEQ ID NO: 181, SEQ ID NO: 182, SEQ ID NO: 183, SEQ ID NO: 184, SEQ ID NO: 185, SEQ ID NO: 186, SEQ ID NO: 187, SEQ ID NO: 188, SEQ ID NO: 189, SEQ ID NO: 190, SEQ ID NO: 191, SEQ ID NO: 192, SEQ ID NO: 193, SEQ ID NO: 194, and SEQ ID NO: 195.

[0261] In particular embodiments, the Nav1.7 binder comprising the Nav1.7-Navβ bispecific binder comprises the amino acid sequence set forth in SEQ ID NO: 96; the amino acid sequence set forth in SEQ ID NO: 148; or, the amino acid sequence set forth in SEQ ID NO: 192.

[0262] In particular embodiments of the Nav1.7 binders or Navβ binders comprising the Nav1.7-Navβ bispecific binder, the N-terminal Glu is substituted with Asp. In particular embodiments, the N-terminal ISVD of the Nav1.7-Navβ binder comprises an Asp amino acid residue at the N-terminus.

### Half-Life Extenders (HLE)

[0263] The Nav1.7 binders, Navβ binders, and Nav1.7-Navβ bispecific binders of the present invention, may further comprise one or more half-life extenders such as one or more anti-HSA (human serum albumin) binders and/or one or more polyethylene glycol (PEG) molecules.

[0264] As discussed herein, the “HSA binders” of the present invention bind to HSA (e.g., an ISVD such as a Nanobody® ISVD) as well as any binder which includes such a molecule that is fused to another binder. An individual HSA binder may be referred to as an HSA binding moiety if it is part of a larger molecule, e.g., a multivalent molecule.

[0265] As further described herein, the HSA binders of the invention that are fused to the Nav1.7 binder, Navβ binder, or Nav1.7-Navβ bispecific binder comprise the same combination of CDRs (i.e., CDR1, CDR2 and CDR3) as are present in ALB11002 or comprise the amino acid sequence of ALB11002 (SEQ ID NO: 234).

[0266] The present invention also includes Nav1.7 binders, Navβ binders, and Nav1.7-Navβ bispecific binders that further include being linked by a peptide or polypeptide linker to one or more HSA binding moieties which are variants of ALB11002, e.g., wherein the HSA binder comprises CDR1, CDR2 and CDR3 of said ALB11002 variants set forth below in Table 6.

TABLE 6
Human Serum Albumin (HSA) Binders

| SEQ | | |
|---|---|---|
| ID | | |
| NO: | Description | Sequence |
| 238 | ALB11002 | EVQLVESGGGXVQPGNSLRLSCAASGFTFSSFGMSW |
| | (may be referred | VRQAPGKGLEWVSSISGSGSDTLYADSVKGRFTISRD |
| | to herein as | NAKTTLYLQMNSLRPEDTAXYYCTIGGSLSRSSQGTL |
| | “ALB201”) | VTVSSA; |
| | | wherein X at positions 11 and 93 are each L or V. |
| | | The CDRs are defined according to the AbM numbering |
| | | scheme. |
| 235 | HSA-CDR1 | GFTFSSFGMS |
| 236 | HSA-CDR2 | SISGSGSDTL |
| 237 | HSA-CDR3 | GGSLSR |
| 265 | ALB00223 | EVOLVESGGGVVQPGGSLRLSCAASGFTFRSFGMSW |
| | | VRQAPGKGPEWVSSISGSGSDTLYADSVKGRFTISRD |
| | | NSKNTLYLQMNSLRPEDTALYYCTIGGSLSRSSQGTL |
| | | VTVSSA |
| | | The CDRs are defined according to the AbM numbering |
| | | scheme. |
| 267 | HSA-CDR1 | GFTFRSFGMS |

[0267] In particular embodiments, the ALB11002 further lacks the C-terminal Alanine (SEQ ID NO: 234). In a further embodiment, the HSA binder comprises the amino acid sequence set forth in SEQ ID NO: 238 but which further comprises an E1D, V11L, and an L93V substitution to provide an HSA binder comprising the amino acid sequence set forth in SEQ ID NO: 240:

### EVQLVESGGGVVQPGNSLRLSCAASGFTFSSFGMSWVRQAPGKGLEWVSSISGSGSDTL YADSVKGRFTISRDNAKTTLYLQMNSLRPEDTALYYCTIGGSLSRSSQGTLVTVSSA.

[0268] This embodiment may further lack the C-terminal Alanine to provide the amino acid sequence set forth in SEQ ID NO: 239.

[0269] In an embodiment of the invention, the HLE is ALB11 comprising the amino acid sequence:

EVQLVESGGGLVQPGNSLRLSCAASGFTFS SFGMSWVRQAPGKGLEWVSSISGSGSDTL YADSVKGRFTISRDNAKTTLYLQMNSLRPEDTAVYYCTIGGSLSRSSQGTLVTVSSA (SEQ ID NO: 242) and in a further embodiment lacks the C-terminal Alanine (SEQ ID NO:241).

[0270] In particular embodiments ALB00233 lacks a C-terminal A as shown in SEQ ID NO: 266.

[0271] In an embodiment of the invention, the half-life extender is an HSA binder comprising: a CDR1 that comprises the amino acid sequence GFTFSSFGMS (SEQ ID NO: 235) or GFTFRSFGMS (SEQ ID NO: 267); a CDR2 that comprises the amino acid sequence SISGSGSDTL (SEQ ID NO: 236); and a CDR3 that comprises the amino acid sequence GGSLSR (SEQ ID NO: 237).

[0272] In an embodiment of the invention, the first amino acid of any of the HSA binders is E and in another embodiment of the invention, the first amino acid of any of the HSA binders is D.

[0273] In particular embodiments, the peptide or polypeptide linker comprises repeating Gly (G) and Ser (S) amino acids to provide for example, 9GS, 15GS, or 35GS peptide or polypeptide linkers (any combination of 9, 15, 20 or 35 G and S amino acids such as, for example, GGGGSGGGS (9GS linker; SEQ ID NO: 243), GGGGSGGGGSGGGGSGGGGS (20GS linker; SEQ ID NO: 244) or GGGGSGGGGSGGGGSGGGGSGGGGSGGGGSGGGGS (35GS linker; SEQ ID NO: 245)),

GGGGSGGGGSGGGGSGGGGSGGGGSGGGGSGGGGSGGGGSGGGGSGGGGS (50GS linker; SEQ ID NO: 463), or (GGGGS (SEQ ID NO: 246)) n wherein n is 1, 2, 3,4, 5, 6, 7, 8, 9 or 10).

[0274] In another embodiment of the invention, the half-life extender is a polyethylene glycol (PEG) moiety appended to the Nav1.7 binder, Navβ binder, or Nav1.7-Navβ bispecific binder to provide a PEGylated Nav1.7 binder, Navβ binder, or Nav1.7-Navβ bispecific binder. The molecular weight of the polyethylene glycol (PEG) moiety may be about 12,000 daltons or about 20,000 daltons. In an embodiment of the invention, the Nav1.7 binder, Navβ binder, or Nav1.7-Navβ bispecific binder comprises one or more polyethylene glycol molecules covalently attached via a linker (e.g., a C₂₋₁₂ alkyl such as —CH₂CH₂CH₂—) to a single amino acid residue of a single subunit of the Nav1.7 binder, Navβ binder, or Nav1.7-Navβ bispecific binder, wherein said amino acid residue is the alpha amino group of the N-terminal amino acid residue or the epsilon amino group of a lysine residue. In an embodiment of the invention, the PEGylated binder is: (PEG)_{b}-L-NH-[binder]; wherein b is 1-9 and L is a C₂₋₁₂ alkyl linker moiety covalently attached to a nitrogen (N) of the single amino acid residue of the binder. In an embodiment of the invention, the PEGylated binder has the formula: [X-0(CH₂CH₂O) ₙ]_{b}-L-NH-[binder], wherein X is H or C₁₋₄ alkyl; n is 20 to 2300; b is 1 to 9; and L is a C₁₋₁₁ alkyl linker moiety which is covalently attached to the nitrogen (N) of the alpha amino group at the amino terminus of one binder subunit; provided that when b is greater than 1, the total of n does not exceed 2300. See, for example, U.S. Pat. No. 7,052,686, which is incorporated herein by reference in its entirety.

[0275] To PEGylate a Nav1.7 binder, Navβ binder, or Nav1.7-Navβ bispecific binder, typically the binder is reacted with a reactive form of polyethylene glycol (PEG), such as a reactive ester or aldehyde derivative of PEG, under conditions in which one or more PEG groups become attached to the binder. In particular embodiments, the PEGylation is carried out via an acylation reaction or an alkylation reaction with a reactive PEG molecule (or an analogous reactive water-soluble polymer). As used herein, the term “polyethylene glycol” is intended to encompass any of the forms of PEG that have been used to derivatizeother proteins, such as mono (C1-C10) alkoxy- or aryloxy-polyethylene glycol or polyethylene glycol-maleimide. In certain embodiments, the binder to be PEGylated is an aglycosylated binder. Methods for PEGylating proteins are known in the art and can be applied to the binder of the invention. See, e.g., EP0154316 and EP0401384, each of which is incorporated herein by reference in its entirety.

[0276] In certain embodiments, the Nav1.7 binder, Navβ binder, or Nav1.7-Navβ bispecific binder is fused at the C-terminus to an HC constant domain of Fc domain thereof domain. In a particular embodiment, the HC domain or Fc domain thereof is of the IgG1, IgG2, IgG3, or IgG4 isotype. The amino acid sequences of the IgG1, IgG2, and IgG4 isotype HC constant domains are set forth in SEQ ID NO: 469, SEQ ID NO: 476, and SEQ ID No: 482, respectively. In the embodiments herein, the Fc domain may comprise the CH2 and CH3 domains of the HC constant domain. In particular embodiments, the Fc domain may further comprise the hinge region between the CH1 and CH2 domains or the hinge region comprising one or amino acid deletions. In exemplary embodiments, Nav1.7 binders, Navβ binders, or Nav1.7-Navβ bispecific binders are fused to an HC domain or Fc domain thereof of the IgG1, IgG2, or IgG4 isotype. In particular embodiments, the Nav1.7 binders, Navβ binders, or Nav1.7-Navβ bispecific binders are fused to the N-terminus of an HC domain or Fc domain thereof. In particular embodiments, the Nav1.7 binders, Navβ binders, or Nav1.7-Navβ bispecific binders are fused to the C-terminus of an HC domain or Fc domain thereof.

[0277] Nav1.7 binders, Navβ binders, or Nav1.7-Navβ bispecific binders of the present invention further include ISVDs that are fused or linked to an effector-silent HC constant domain or Fc domain thereof The effector-silent HC constant domain or Fc domain has been modified such that it displays no measurable binding to one or more FcRs or displays reduced binding to one or more FcRs compared to that of an unmodified HC constant domain or Fc domain of the same IgG isotype. The effector-silent HC constant domain or Fc domain may in further embodiments display no measurable binding to each of FcγRIIIa, FcγRIIa, and FcγRI or display reduced binding to each of FcγRIIIa, FcγRIIa, and FcγRI compared to that of an unmodified antibody of the same IgG isotype. In particular embodiments, the effector-silent HC constant domain or Fc domain is a modified human HC constant domain or Fc domain.

[0278] In particular embodiments, the effector-silent HC constant domain or Fc domain thereof comprises an Fc domain of an IgG1 or IgG2, IgG3, or IgG4 isotype that has been modified to lack N-glycosylation of the asparagine (Asn) residue at position 297 (Eu numbering system) of the HC constant domain. The consensus sequence for N-glycosylation is Asn-Xaa-Ser/Thr (wherein Xaa at position 298 is any amino acid except Pro); in all four isotypes the N-glycosylation consensus sequence is Asn-Ser-Thr. The modification may be achieved by replacing the codon encoding the Asn at position 297 in the nucleic acid molecule encoding the HC constant domain with a codon encoding another amino acid, for example Ala, Asp, Gln, Gly, or Glu, e.g. N297A, N297Q, N297G, N297E, or N297D. Alternatively, the codon for Ser at position 298 may be replaced with the codon for Pro or the codon for Thr at position 299 may be replaced with any codon except the codon for Ser. In a further alternative each of the amino acids comprising the N-glycosylation consensus sequence is replaced with another amino acid. Such modified IgG molecules have no measurable effector function. In particular embodiments, these mutated HC molecules may further comprise 1, 2, 3, 4, 5, 6, 7, 8, 9, or 10 additional amino acid substitutions, insertions, and/or deletions, wherein said substitutions may be conservative mutations or non-conservative mutations. In further embodiments, such IgGs modified to lack N-glycosylation at position 297 may further include one or more additional mutations disclosed herein for eliminating measurable effector function.

[0279] An exemplary IgG1 HC constant domain or Fc domain thereof mutated at position 297, which abolishes the N-glycosylation of the HC constant domain, is set forth in SEQ ID NO: 474, an exemplary IgG2 HC constant domain mutated at position 297, which abolishes the N-glycosylation of the HC constant, is set forth in SEQ ID NO: 480, and an exemplary IgG4 HC constant domain mutated at position 297 to abolish N-glycosylation of the HC constant domain is set forth in SEQ ID NO: 485. In particular embodiments, these mutated HC molecules may further comprise 1, 2, 3, 4, 5, 6, 7, 8, 9, or 10 additional amino acid substitutions, insertions, and/or deletions, wherein said substitutions may be conservative mutations or non-conservative mutations.

[0280] In particular embodiments, the HC constant domain or Fc domain thereof of the IgG1 IgG2, IgG3, or IgG4 HC constant domain is modified to include one or more amino acid substitutions selected from E233P, L234A, L235A, L235E, N297A, N297D, D265S, and P331S (wherein the positions are identified according to Eu numbering) and wherein said HC constant domain is effector-silent. In particular embodiments, the modified IgG1 further comprise 1, 2, 3, 4, 5, 6, 7, 8, 9, or 10 additional amino acid substitutions, insertions, and/or deletions, wherein said substitutions may be conservative mutations or non-conservative mutations.

[0281] In particular embodiments, the HC constant domain or Fc domain thereof comprises L234A, L235A, and D265S substitutions (wherein the positions are identified according to Eu numbering). In particular embodiments, the HC constant domain comprises an amino acid substitution at position Pro329 and at least one further amino acid substitution selected from E233P, L234A, L235A, L235E, N297A, N297D, D265S, and P331S (wherein the positions are identified according to Eu numbering). These and other substitutions are disclosed in WO9428027; WO2004099249; WO20121300831, U.S. Pat. Nos. 9,708,406; 8,969,526; 9,296,815; Sondermann et al. Nature 406, 267-273 (2000), each of which is incorporated herein by reference in its entirety).

[0282] In particular embodiments of the above, the HC constant domain or Fc domain thereof comprises an L234A/L235A/D265A; L234A/L235A/P329G; L235E; D265A; D265A/N297G; or V234A/G237A/P238S/H268A/V309L/A330S/P331S substitutions, wherein the positions are identified according to Eu numbering. In particular embodiments, the HC molecules further comprise 1, 2, 3, 4, 5, 6, 7, 8, 9, or 10 additional amino acid substitutions, insertions, and/or deletions, wherein said substitutions may be conservative mutations or non-conservative mutations.

[0283] In particular embodiments, the effector-silent HC constant domain or Fc domain thereof comprises an IgG1 isotype, in which the Fc domain of the HC constant domain has been modified to be effector-silent by substituting the amino acids from position 233 to position 236 of the IgG1 with the corresponding amino acids of the human IgG2 HC and substituting the amino acids at positions 327, 330, and 331 with the corresponding amino acids of the human IgG4 HC, wherein the positions are identified according to Eu numbering (Armour et al., Eur. J. Immunol. 29(8):2613-24 (1999); Shields et al., J. Biol. Chem. 276(9):6591-604(2001)). In particular embodiments, the modified IgG1 further comprise 1, 2, 3, 4, 5, 6, 7, 8, 9, or 10 additional amino acid substitutions, insertions, and/or deletions, wherein said substitutions may be conservative mutations or non-conservative mutations.

[0284] In particular embodiments, the effector-silent HC constant domain or Fc domain thereof is a hybrid human immunoglobulin HC constant domain, which includes a hinge region, a CH2 domain and a CH3 domain in an N-terminal to C-terminal direction, wherein the hinge region comprises an at least partial amino acid sequence of a human IgD hinge region or a human IgG1 hinge region; and the CH2 domain is of a human IgG4 CH2 domain, a portion of which, at its N-terminal region, is replaced by 4-37 amino acid residues of an N-terminal region of a human IgG2 CH2 or human IgD CH2 domain. Such hybrid human HC constant domain is disclosed in U.S. Pat. No. 7,867,491, which is incorporated herein by reference in its entirety.

[0285] In particular embodiments, the effector-silent HC constant domain or Fc domain thereof is an IgG4 HC constant domain in which the serine at position 228 according to the Eu system is substituted with proline, see for example SEQ ID NO: 52. This modification prevents formation of a potential inter-chain disulfide bond between the cysteines at positions Cys226 and Cys229 in the EU numbering scheme and which may interfere with proper intra-chain disulfide bond formation. See Angal et al. Mol. Imunol. 30:105 (1993); see also (Schuurman et al., Mol. Immunol. 38: 1-8, (2001)). In further embodiments, the IgG4 constant domain includes in addition to the S228P substitution, a P239G, D265A, or D265A/N297G amino acid substitution, wherein the positions are identified according to Eu numbering. In particular embodiments of the above, the IgG4 HC constant domain is a human HC constant domain. In particular embodiments, the HC molecules further comprise 1, 2, 3, 4, 5, 6, 7, 8, 9, or 10 additional amino acid substitutions, insertions, and/or deletions, wherein said substitutions may be conservative mutations or non-conservative mutations.

[0286] Exemplary IgG1 HC constant domains comprise an amino acid sequence selected from the group consisting of amino acid sequences set forth in SEQ ID NO: 470, SEQ ID NO: 471, SEQ ID NO: 472, SEQ ID NO: 473, SEQ ID NO: 474, and SEQ ID NO: 475.

[0287] Exemplary IgG2 HC constant domains comprise an amino acid sequence selected from the group consisting of amino acid sequences set forth in SEQ ID NO: 477, SEQ ID NO: 478, SEQ ID NO: 479, and SEQ ID NO: 480.

[0288] Exemplary IgG4 HC constant domains comprise an amino acid sequence selected from the group consisting of amino acid sequences set forth in SEQ ID NO: 483, SEQ ID NO: 484, and SEQ ID NO: 485.

[0289] The particular embodiments, the Nav1.7 binder, Navβ binder, or Nav1.7-Navβ bispecific binder is linked to the HC constant domain or Fc domain thereof by a peptide or polypeptide linker to provide a fusion protein comprising the structure binder-linker-HC constant domain or Fc domain thereof or HC constant domain-linker-binder wherein binder refers to Nav1.7 binder, Navβ binder, or Nav1.7-Navβ bispecific binder. The Fc domain thereof as used herein includes embodiments lacking the hinge region and embodiments wherein the Fc comprises one or amino acids of the hinge region.

[0290] In particular embodiments, the peptide or polypeptide linker comprises repeating Gly (G) and Ser (S) amino acids to provide for example, 9GS, 15GS, or 35GS peptide or polypeptide linkers (any combination of 9, 15, 20 or 35 G and S amino acids such as, for example, GGGGSGGGS (9GS linker; SEQ ID NO: 243), GGGGSGGGGSGGGGSGGGGS (20GS linker; SEQ ID NO: 244) or GGGGSGGGGSGGGGSGGGGSGGGGSGGGGSGGGGS (35GS linker; SEQ ID NO: 245)),

GGGGSGGGGSGGGGSGGGGSGGGGSGGGGSGGGGSGGGGSGGGGSGGGGS (50GS linker; SEQ ID NO: 463), or (GGGGS (SEQ ID NO: 246)) n wherein n is 1, 2, 3, 4, 5, 6, 7, 8, 9 or 10).

[0291] In particular embodiments, the Nav1.7 binders, Navβ binders, or Nav1.7-Navβ bispecific binders are fused to the N-terminus of an effector-silent HC domain or Fc domain thereof. In particular embodiments, the Nav1.7 binders, Navβ binders, or Nav1.7-Navβ bispecific binders are fused to the C-terminus of an effector-silent HC domain or Fc domain thereof.

[0292] In particular embodiments, the Nav1.7 binders, Navβ binders, or Nav1.7-Navβ bispecific binders are linked to the N-terminus of an effector-silent HC domain or Fc domain thereof by a non-peptide linker, which in particular embodiments, may be a non-peptide polymer. The non-peptide polymer refers to a biocompatible polymer to which at least two repeat units are conjugated, and the repeat units are interconnected by random covalent bonds other than peptide bonds. The non-peptide polymer may be selected from the group consisting of polyethylene glycol, polypropylene glycol, a copolymer between ethylene glycol and propylene glycol, polyoxyethylated polyol, polyvinyl alcohol, polysaccharide, dextran, polyvinyl ethyl ether, a biodegradable polymer such as polylactic acid (PLA) and polylactic-glycolic acid (PLGA), lipid polymer, chitins, hyaluronic acid, and a combination thereof, and preferably, polyethylene glycol. The derivatives known in the art and the derivatives that can easily be prepared using the technology in the art are also included in the scope of the present invention. In particular embodiments, the non-peptide linker comprises polyethylene glycol, which in particular embodiments may be 3,400 daltons. Conjugates comprising a heterologous protein conjugated to an Fc domain by a non-peptide linker have been disclosed in U.S. Pat. Nos. 7,636,420; 7,737,260; 7,968,316; 8,029,789; 8,110,665; 8,124,094; 8,822,650; 8,846,874; 9,394, 546; 10,071,171; 10,272,159; and 10,973,881, each of which is incorporated herein by reference in its entirety.

[0293] In particular embodiments, the HC constant domain or Fc domain conjugates form a homodimer wherein each HC constant domain or Fc domain conjugates comprising the homodimer is fused or conjugated to the same binder selected from Nav1.7 binder, Navβ binder, and Nav1.7-Navβ bispecific binder. In particular embodiments, the HC constant domain or Fc domain conjugates form a heterodimer wherein a HC constant domain or Fc domain conjugate comprising the heterodimer is fused or conjugated to a binder selected from Nav1.7 binder, Navβ binder, and Nav1.7-Navβ bispecific binder and a second HC constant domain or Fc domain conjugate comprising the heterodimer is fused or conjugated to a binder selected from Nav1.7 binder, Navβ binder, and Nav1.7-Navβ bispecific binder that is not fused or conjugated to the first HC constant domain or Fc domain conjugate. In particular embodiments, the HC constant domain or Fc domain conjugate form a heterodimer wherein a first HC constant domain or Fc domain conjugate comprising the heterodimer is fused or conjugated to a binder selected from Nav1.7 binder, Navβ binder, and Nav1.7-Navβ bispecific binder and the second HC constant domain or Fc domain is not fused or conjugated to a Nav1.7 binder, Navβ binder, and Nav1.7-Navβ bispecific binder. In particular embodiments, the second HC constant domain or Fc domain is fused or conjugated to a heterologous protein, which may be the Fab of an antibody or ISVD other than a Nav1.7 binder, Navβ binder, or Nav1.7-Navβ bispecific binder; a heterologous protein, polypeptide, or peptide; or a small molecule. HC constant domain and Fc domain heterodimers have been disclosed in WO9627011; WO9850431; WO9929732; WO2009089004; WO2013055809; WO2013063702; WO2014145907; and WO2014084607, each of which is incorporated herein by reference in its entirety.

[0294] In particular embodiments of the invention, the HC constant or Fc domains as disclosed herein may comprise a C-terminal lysine or lack either a C-terminal lysine or a C-terminal glycine-lysine dipeptide.

### C-Terminal Extensions

[0295] The present invention further provides Nav1.7 binders, Navβ binders, or Nav1.7-Navβ bispecific binders that comprise a C-terminal extension. The present invention provides, for example, C-terminal extensions such as X(n), wherein X and n can be as follows:
[0296] (a) n=1 and X=Ala;
[0297] (b) n=2 and each X=Ala;
[0298] (c) n=3 and each X=Ala;
[0299] (d) n=2 and at least one X=Ala (with the remaining amino acid residue(s) X being independently chosen from any naturally occurring amino acid but preferably being independently chosen from Val, Leu and/or Ile);
[0300] (e) n=3 and at least one X=Ala (with the remaining amino acid residue(s) X being independently chosen from any naturally occurring amino acid but preferably being independently chosen from Val, Leu and/or Ile);
[0301] (f) n=3 and at least two X=Ala (with the remaining amino acid residue(s) X being independently chosen from any naturally occurring amino acid but preferably being independently chosen from Val, Leu and/or Ile);
[0302] (g) n=1 and X=Gly;
[0303] (h) n=2 and each X=Gly;
[0304] (i) n=3 and each X=Gly;
[0305] (j) n=2 and at least one X=Gly (with the remaining amino acid residue(s) X being independently chosen from any naturally occurring amino acid but preferably being independently chosen from Val, Leu and/or Ile);
[0306] (k) n=3 and at least one X=Gly (with the remaining amino acid residue(s) X being independently chosen from any naturally occurring amino acid but preferably being independently chosen from Val, Leu and/or Ile);
[0307] (l) n=3 and at least two X=Gly (with the remaining amino acid residue(s) X being independently chosen from any naturally occurring amino acid but preferably being independently chosen from Val, Leu and/or Ile);
[0308] (m) n=2 and each X=Ala or Gly;
[0309] (n) n=3 and each X=Ala or Gly;
[0310] (o) n=3 and at least one X=Ala or Gly (with the remaining amino acid residue(s) X being independently chosen from any naturally occurring amino acid but preferably being independently chosen from Val, Leu and/or Ile); or
[0311] (p) n=3 and at least two X=Ala or Gly (with the remaining amino acid residue(s) X being independently chosen from any naturally occurring amino acid but preferably being independently chosen from Val, Leu and/or Ile);
   with aspects (a), (b), (c), (g), (h), (i), (m) and (n) being preferred, with aspects in which n=1 or 2 being preferred and aspects in which n=1 being preferred.

[0312] Some specific, but non-limiting examples of useful C-terminal extensions are the following amino acid sequences: A, AA, AAA, G, GG, GGG, AG, GA, AAG, AGG, AGA, GGA, GAA or GAG.

[0313] In an embodiment of the invention, any C-terminal extension present in a Nav1.7 binder, Navβ binder, or Nav1.7-Navβ bispecific binder does not contain a free cysteine residue (unless said cysteine residue is used or intended for further functionalization, for example for PEGylation).

### Conjugates

[0314] The Nav1.7 binders, Navβ binders, or Nav1.7-Navβ bispecific binders disclosed herein may also be conjugated to a chemical moiety. Such conjugated binders are an embodiment of the present invention. The chemical moiety may be, inter alia, a polymer, a radionuclide or a cytotoxic factor. In particular embodiments, the chemical moiety is a polymer that increases the half-life of the Nav1.7 binder, Navβ binder, or Nav1.7-Navβ bispecific binder in the body of a subject. Suitable polymers include, but are not limited to, hydrophilic polymers, which include but are not limited to, polyethylene glycol (PEG) (e.g., PEG with a molecular weight of 2 kDa, 5 kDa, 10 kDa, 12 kDa, 20 kDa, 30 kDa or 40 kDa), dextran and monomethoxypolyethylene glycol (mPEG). Lee, et al., (1999) (Bioconj. Chem. 10:973-981) discloses PEG conjugated single-chain antibodies. Wen, et al., (2001) (Bioconj. Chem. 12:545-553) disclose conjugating antibodies with PEG which is attached to a radiometal chelator (diethylenetriaminpentaacetic acid (DTPA)).

[0315] The Nav1.7 binders, Navβ binders, or Nav1.7-Navβ bispecific binders disclosed herein may also be conjugated with labels such as ⁹⁹Tc, ⁹⁰Y, ¹¹¹In, ³²P, ¹⁴C, ¹²⁵I, ³H, ¹³¹I, ¹¹C, ¹⁵O, ¹³N, ¹⁸F, ³⁵S, ⁵¹Cr, ⁵⁷To, ²²⁶Ra, ⁶⁰Co, ⁵⁹Fe, ⁵⁷Se, ¹⁵²Eu, ⁶⁷CU, ²¹⁷Ci, ²¹¹At, ²¹²Pb, ⁴⁷Sc, ¹⁰⁹Pd, ²³⁴Th, and ⁴⁰K, ¹⁵⁷Gd, ⁵⁵Mn, ⁵²Tr, and ⁵⁶ Fe.

[0316] The Nav1.7 binders may also be conjugated with fluorescent or chemiluminescent labels, including fluorophores such as rare earth chelates, fluorescein and its derivatives, rhodamine and its derivatives, isothiocyanate, phycoerythrin, phycocyanin, allophycocyanin, o-phthaladehyde, fluorescamine, ¹⁵²Eu, dansyl, umbelliferone, luciferin, luminal label, isoluminal label, an aromatic acridinium ester label, an imidazole label, an acridimium salt label, an oxalate ester label, an aequorin label, 2,3-dihydrophthalazinediones, biotin/avidin, spin labels and stable free radicals.

[0317] The Nav1.7 binder, Navβ binder, or Nav1.7-Navβ bispecific binder may also be conjugated to a cytotoxic factor such as diptheria toxin, Pseudomonas aeruginosa exotoxin A chain, ricin A chain, abrin A chain, modeccin A chain, alpha-sarcin, Aleurites fordii proteins and compounds (e.g., fatty acids), dianthin proteins, Phytoiacca americana proteins PAPI, PAPII, and PAP-S, Momordica charantia inhibitor, curcin, crotin, Saponaria officinalis inhibitor, mitogellin, restrictocin, phenomycin, and enomycin.

[0318] Any method known in the art for conjugating a Nav1.7 binder, Navβ binder, or Nav1.7-Navβ bispecific binder to the various moieties may be employed, including those methods described by Hunter, et al., (1962) Nature 144:945; David, et al., (1974) Biochemistry 13:1014; Pain, et al., (1981) J. Immunol. Meth. 40:219; and Nygren, J., (1982) Histochem. and Cytochem. 30:407. Methods for conjugating binders are conventional and very well known in the art.

[0319] The present invention further provides nucleic acid molecules encoding any one of the Nav1.7 binders, Navβ binders, or Nav1.7-Navβ bispecific binders disclosed herein. In particular embodiments, the nucleic acid molecule encoding the Nav1.7 binder comprises a nucleotide sequence selected from the group of nucleotide sequences set forth in SEQ ID NO: 273-283. In particular embodiments, the nucleic acid molecule encoding the Nav1.7 binder comprises a nucleotide sequence selected from the group of nucleotide sequences set forth in SEQ ID NO: 284-421. In particular embodiments, the nucleic acid molecule encoding the Navβ binder comprises a nucleotide sequence selected from the group of nucleotide sequences set forth in SEQ ID NO: 456-461.

[0320] The following examples are intended to promote a further understanding of the present invention. The amino acid sequences for the Nav1.7 binder, Navβ binder, or Nav1.7-Navβ bispecific binders and nucleic acid sequences encoding the Nav1.7 binder, Navβ binder, or Nav1.7-Navβ bispecific binders that are disclosed in the following examples are provided in Table 56. Various embodiments of the aforementioned binders comprise an amino acid sequence set forth in Table 56.

### Example 1

[0321] Generation of Stable Recombinant huNav1.7α Cell Lines

[0322] Different stable CHO FlpIn (ThermoFisher Scientific, catalog #R758-07) or HEK FlpIn (ThermoFisher Scientific, catalog #R750-07) transgenic cell lines were generated according to the manufacturer's instructions. To this purpose, different Nav1.7α constructs (human or rhesus) were cloned into pcDNA5/FRT (ThermoFisher Scientific, catalog #V601020). The amino acid sequences for huNav1.7α, rhNav1.7α, huNav1.1α, huNav1.2α, huNav 1.3α, huNav1.4α, huNav1.5α, huNav1.6α, and huNav1.8α are set forth in SEQ ID NO: 1, SEQ ID NO: 2, SEQ ID NO: 23, SEQ ID NO: 24, SEQ ID NO: 25, SEQ ID NO: 26, SEQ ID NO: 27, and SEQ ID NO: 28, respectively. The generation of HEK293 cell lines stably expressing huNav1.7a with and without the human β subunit is detailed elsewhere (Schmalhofer et al. Mol Pharmacol 74:1476-1484, 2008). HEK cell lines expressing huNav1.1α, huNav1.2α, huNav1.3α, huNav1.4α, huNav1.5α, huNav1.6α, or huNav1.8α were constructed.

[0323] A detailed sequence comparison of the different extra-cellular loops (ECLs) of huNav1.7a to their ortholog and paralog counterparts is shown in FIGS. 2A-2B. Different splice variants of Nav1.7α exist that through interaction with β1 impact on the electrophysiological properties of the channel (Chatelier et al. 2008 J Neurophysiol 99: 2241; Farmer et al. 2012 PLoS ONE 7: e41750). The 5N11S variant of huNav1.7a (FIG. 32) was used consistently throughout the examples. The major technical drawbacks of Nav1.7α as a target for biologicals are its poor cell surface expression level combined with a limited accessibility to the extracellular surface.

[0324] For various experiments set forth in the examples, the Nav constructs where indicated were fused at the C-terminus via a P2A viral peptide linker (SEQ ID NO: 43) to a single polypeptide encoding sodium channel beta subunits β1 (SEQ ID NO: 40), β2 (SEQ ID NO: 41), and β3 (SEQ ID NO: 42) in tandem in which each β subunit is separated from the preceding β subunit by a P2A viral peptide linker (referred to herein as β1-β2-β3; See SEQ ID NO:21). The P2A peptide linker facilitates a co-translational cleavage event that effectively liberates polypeptides N-terminal and C-terminal to it.

### Plasmid Constructs and Expression Vectors

[0325] Table 7 gives an overview of all plasmid constructs and expression vectors.

TABLE 7
Overview plasmid DNA constructs

| Plasmid ID | Description |
|---|---|
| pCMV6-AC-Myc-DDK- | Origene clone with wild type huNav1.7α sequence |
| NM_002977.1 | (NM_002977.1) |
| pFRT/lacZEO | Basic vector for generation of Flp-In compatible cell |
| | backgrounds |
| pcDNA3.1-CO_huNav1.7 | Codon-optimized human source sequence |
| pcDNA3.1-CO_rhNav1.7 | Codon-optimized rhesus source sequence |
| pcDNA3.1- | Codon-optimized huNav1.7α/Nav1.5α chimera source |
| CO_huNav157chim14 | sequence (ECLs and transmembrane helices from Nav1.7α |
| | ICLs from Nav1.5α) \| combines native extracellular |
| | conformation of Nav1.7α with increased expression levels of |
| | Nav1.5α |
| pJTI-R4-DEST- | Codon-optimized huNav1.7α/Nav1.5α chimera and the |
| CO_huNav157chim14- | Navβ1-β3 subunits (β1-β2-β3) as picoRNA viral fusion source |
| PV_SCN1B-SCN2B-SCN3B | sequence |
| pJTI-R4-DEST- | Codon-optimized huNav1.7α and the Navβ1-β3 subunits (β1- |
| CO_huNav1.7-PV_SCN1B- | β2-β3) as picoRNA viral fusion source sequence |
| SCN2B-SCN3B | |
| pVAX1-NM_002977.1 | Vector for DNA immunizations with wild type huNav1.7α |
| | sequence |
| pcDNA3.1/Hygro- | Vector for cell line transfections with wild type huNav1.7α |
| NM_002977.1 | sequence |
| pcDNA5/FRT-NM_002977.1 | Vector for Flp-In cell line transfections with wild type |
| | huNav1.7α sequence |
| pcDNA5/FRT-CO_huNav1.7 | Vector for Flp-In cell line transfections with codon-optimized |
| | huNav1.7α sequence |
| pVAX1-CO_huNav1.7 | Vector for DNA immunizations with codon-optimized |
| | huNav1.7α sequence |
| pcDNA5/FRT- | Vector for Flp-In cell line transfections with huNav157 |
| huNav157chim14 | chimera 14 |
| pVAX1- | Vector for DNA immunizations with huNav157 chimera 14 |
| CO_huNav157chim14 | |
| pcDNA5/FRT- | Vector for Flp-In cell line transfections with huNav157 |
| CO_huNav157chim14- | chimera 14 and the Navβ1-β3 subunits (β1-β2-β3) |
| PV_SCN1B-SCN2B-SCN3B | |
| pcDNA5/FRT- | Vector for Flp-In cell line transfections with codon-optimized |
| CO_huNav1.7-PV_SCN1B- | huNav1.7α sequence and the Navβ1-β3 subunits (β1-β2-β3) |
| SCN2B-SCN3B | |
| pcDNA5/FRT-CO_huNav1.7 | Vector for Flp-In cell line transfections with codon-optimized |
| (P149_D150insFLAG) | huNav1.7α with triple FLAG tag inserted between aa 149 and |
| | 150 (S1 of Domain 1) for cell surface expression detection via |
| | tag |
| pcDNA5/FRT-CO_huNav1.7 | same as above but triple FLAG inserted between aa 148 and |
| (P148_P149insFLAG) | 149 |
| pcDNA3.1-CO_huNav1.5α | Codon-optimized human Nav1.5α source sequence |
| pcDNA5/FRT- | Vector for Flp-In cell line transfections with codon-optimized |
| CO_huNav1.5-PV_SCN1B- | huNav1.5α sequence and the Navβ1-β3 subunits (β1-β2-β3) to |
| SCN2B-SCN3B | be used as controls in selections and screening |
| pcDNA3.1- | Codon-optimized huNav1.7α/Nav1.5α chimera source |
| CO_huNav157chim1* | sequence (DI, DII and DIII from Nav1.7α, DIV from |
| | Nav1.5α) |
| pcDNA3.1- | Codon-optimized huNav1.7/Nav1.5α chimera source |
| CO_huNav157chim2* | sequence (DI, DII and DIV from Nav1.7α, DIII from |
| | Nav1.5α) |
| pcDNA3.1- | Codon-optimized huNav1.7α/Nav1.5α chimera source |
| CO_huNav157chim3* | sequence (DI, DIII and DIV from Nav1.7α, DII from |
| | Nav1.5α) |
| pcDNA3.1- | Codon-optimized huNav1.7α/Nav1.5α chimera source |
| CO_huNav157chim4* | sequence (DII, DIII and DIV from Nav1.7α, DI from |
| | Nav1.5α) |
| pcDNA3.1- | Codon-optimized huNav1.7α/Nav1.5α chimera source |
| CO_huNav157chim5* | sequence (DI, DII and DIII from Nav1.5α, DIV from |
| | Nav1.7α) |
| pcDNA3.1- | Codon-optimized huNav1.7α/Nav1.5α chimera source |
| CO_huNav157chim6* | sequence (DI, DII and DIV from Nav1.5α, DIII from |
| | Nav1.7α) |
| pcDNA3.1- | Codon-optimized huNav1.7α/Nav1.5α chimera source |
| CO_huNav157chim7* | sequence (DI, DIII and DIV from Nav1.5α, DII from |
| | Nav1.7α) |
| pcDNA3.1- | Codon-optimized huNav1.7α/Nav1.5α chimera source |
| CO_huNav157chim8* | sequence (DII, DIII and DIV from Nav1.5α, DI from |
| | Nav1.7α) |
| pcDNA3.1- | Codon-optimized huNav1.7α/Nav1.5α chimera source |
| CO_huNav157chim9* | sequence (DI, DII, DIII and DIV VSD from Nav1.7α, DIV |
| | S5-S6 from Nav1.5α) |
| pcDNA3.1- | Codon-optimized huNav1.7α/Nav1.5α chimera source |
| CO_huNav157chim10* | sequence (DI, DII, DIII VSD and DIV from Nav1.7α, DIII |
| | S5-S6 from Nav1.5α) |
| pcDNA3.1- | Codon-optimized huNav1.7α/Nav1.5α chimera source |
| CO_huNav157chim11* | sequence (DI, DI VSD, DIII and DIV from Nav1.7α, DII S5- |
| | S6 from Nav1.5α) |
| pcDNA3.1- | Codon-optimized huNav1.7α/Nav1.5α chimera source |
| CO_huNav157chim12* | sequence (DI VSD, DII, DIII and DIV from Nav1.7α, DI S5- |
| | S6 from Nav1.5α) |
| pcDNA3.1- | Codon-optimized huNav1.7α/Nav1.5α chimera source |
| CO_huNav157chim18* | sequence (DI, DII, DIII and DIV S5-S6 from Nav1.7α, DIV |
| | VSD from Nav1.5α) |
| pcDNA3.1- | Codon-optimized huNav1.7α/Nav1.5α chimera source |
| CO_huNav157chim22* | sequence (DI, DII, DIII and DIV S3-S6 from Nav1.7α, DIV |
| | S1-S2 from Nav1.5α) |
| pcDNA5/FRT-CO_rhNav1.7- | Vector for Flp-In cell line transfections with codon-optimized |
| PV_SCN1B-SCN2B-SCN3B | rhNav1.7α sequence and the human Navβ1-β3 subunits (β1- |
| | β2-β3) |
| pcDNA5/FRT- | Vector for Flp-In cell line transfections with codon-optimized |
| CO_huNav1.7(N146S, V194I, | huNav1.7α sequence containing all DI polymorphisms of |
| F276V, R277Q, E281V, V331M, | rhNav1.7α and the human Navβ1-β3 subunits (β1-β2-β3) |
| E504D, D507E, S508N, N533S)- | |
| PV_SCN1B-SCN2B-SCN3B | |
| pcDNA5/FRT-CO_rhNav1.7- | Vector for Flp-In cell line transfections with codon-optimized |
| PV_rhSCN1B-rhSCN2B- | rhNav1.7α sequence and the rhesus Navβ1-β3 subunits (β1- |
| rhSCN3B | β2-β3) |
| pcDNA5/FRT- | Vector for Flp-In cell line transfections with codon-optimized |
| CO_huNav1.7(F276V)- | huNav1.7α sequence containing extracellular DI rhNav1.7α |
| PV_SCN1B-SCN2B-SCN3B | polymorphism F276V and the human Navβ1-β3 subunits (β1- |
| | β2-β3) |
| pcDNA5/FRT- | Vector for Flp-In cell line transfections with codon-optimized |
| CO_huNav1.7(R277Q)- | huNav1.7α sequence containing extracellular DI rhNav1.7α |
| PV_SCN1B-SCN2B-SCN3B | polymorphism R277Q and the human Navβ1-β3 subunits (β1- |
| | β2-β3) |
| pcDNA5/FRT- | Vector for Flp-In cell line transfections with codon-optimized |
| CO_huNav1.7(E281V)- | huNav1.7α sequence containing extracellular DI rhNav1.7α |
| PV_SCN1B-SCN2B-SCN3B | polymorphism E281V and the human Navβ1-β3 subunits (β1- |
| | β2-β3) |
| pcDNA5/FRT- | Vector for Flp-In cell line transfections with codon-optimized |
| CO_huNav1.7(V331M)- | huNav1.7α sequence containing extracellular DI rhNav1.7α |
| PV_SCN1B-SCN2B-SCN3B | polymorphism V331M and the human Navβ1-β3 subunits |
| | (β1-β2-β3) |
| pcDNA5/FRT- | Vector for Flp-In cell line transfections with codon-optimized |
| CO_huNav1.7(Q1530P)- | huNav1.7α sequence containing extracellular DIV rhNav1.7α |
| PV_SCN1B-SCN2B-SCN3B | polymorphism Q1530P and the human Navβ1-β3 subunits |
| | (β1-β2-β3) |
| pcDNA5/FRT- | Vector for Flp-In cell line transfections with codon-optimized |
| CO_huNav1.7(H1531Y)- | huNav1.7α sequence containing extracellular DIV rhNav1.7α |
| PV_SCN1B-SCN2B-SCN3B | polymorphism H1531Y and the human Navβ1-β3 subunits |
| | (β1-β2-β3) |
| pcDNA5/FRT- | Vector for Flp-In cell line transfections with codon-optimized |
| CO_huNav1.7(E1534D)- | huNav1.7α sequence containing extracellular DIV rhNav1.7α |
| PV_SCN1B-SCN2B-SCN3B | polymorphism E1534D and the human Navβ1-β3 subunits |
| | (β1-β2-β3) |

*huNav157 chimeras are schematically drawn in FIG. 16.

Generation of HEK293T Cells, Transiently Transfected with Different huNav1.7α Constructs

[0326] To this purpose, different Nav1.7α constructs were cloned into pcDNA3.1 (ThermoFisher Scientific, catalog #V79020) and plasmid DNA was prepared from Escherichia coli TOP10 cells. HEK293T cells were seeded at a concentration of 1.5×10⁶ per T75 flask and incubated overnight at 37° C. in DMEM (Dulbecco's modified Eagle's medium; Gibco, catalog #31966) supplemented with 10% FBS (fetal bovine serum, Sigma. Catalog #F7524). The medium was then replaced by Opti-MEM medium (Gibco, catalog #31985). A mixture of 9 μg plasmid DNA, 27 μL, Fugene 6 (Promega, catalog #E2691) in a final volume of 1 mL Opti-MEM was incubated for 15 min at room temperature and then added to the cells. After 3 hours incubation at 37° C., 10 mL of DMEM supplemented with 20% FBS was added and incubation continued. After 48 hours, cells were washed with phosphate buffered saline (PBS) and resuspended with 4 mL of trypsin EDTA (Gibco, catalog #25200-056) followed by addition of 6 mL DMEM medium supplemented with 10% FBS.

### Membrane Preparations

[0327] On Day 1, suspend pellet in 3 mL HB (250 mM Sucrose, 25 mM HEPES, pH 7.5)+μL Mammalian Protease Inhibitor cocktail+30 μL Benzonase/Nuclease-Dnase (25 U/μL) PER 1 billion cells; dounce homogenize with 5 strokes of a Type B/tight fit pestle (glass homogenizer); transfer homogenized cells to Nalgene 3119-0050 Oak Ridge centrifuge tubes and centrifuge at 5 k×g (6,025 rpm) for 30 minutes at 4° C. Collect supernatant fraction (and store on ice (pellet P1). Suspend pellet in 2 mL HB. Repeat dounce homogenization and transfer homogenized cells to fresh 50 mL falcon tubes. Increase the volume to 50 mL with HB. Centrifuge at 2 k xg (3,161 rpm) in for 15 minutes at 4° C.; collect the supernatant fraction, and pool with supernatant fraction collected above (P1). Suspend pellet in 2 mL HB. Repeat dounce homogenization. Increase volume to 50 mL with HB. Repeat 2K xg centrifugation. Collect the supernatant fraction and pool with the supernatant fraction collected above (P1). Transfer pooled supernatant fraction to fresh Nalgene tubes. Fill to fill line with HB. (P1) Suspend remaining pellet and transfer to fresh Nalgene tube. Fill to fill-line with HB to produce pellet 2 (P2). Centrifuge P1 & P2 at 39,800 xg (17 k rpm) for 45 minutes at 4° C. Keep 1 mL of supernatants (s1a+s2a). Store in −80° C. and decant remainder of supernatant fractions. Suspend pellets (P1+P2) in 0.1 M FB (100 mM NaCl, 25 mM Tris-HCl pH7.5). Repeat centrifugation at 39.8 k xg for 45 minutes at 4° C. Keep 1 mL of supernatants (s1b+s2b). Store at −80° C. Decant remainder of supernatants. Store pellets (P1+P2) on ice in 4° C. overnight.

[0328] On Day 2, suspend pellets in 1.5 M FB (1.5 M NaCl, 25 mM Tris-HCl pH7.5); dounce homogenize with 5 strokes of a Type B/tight fit pestle (glass homogenizer); transfer pellet to Nalgene 3119-0050 tube(s) and fill to fill line with 1.5 M FB; centrifuge at 39.8 k xg for 45 min at 4C; remove supernatant fraction and store pellets at −80° C. (SA).

[0329] Pool like pellets in 5-10 mL 1.5 M FB; dounce homogenize with 5 strokes of a Type B/tight fit pestle (glass homogenizer); return membrane to Nalgene tube and again fill to fill line with 1.5 M FB; repeat centrifuge at 39,800 xg (17 k rpm) for 45 minutes at 4° C. Remove supernatant fraction and store pellets at −80° C. (SB).

[0330] Suspend pellets in 5-10 mL 0.1 M FB; repeat dounce homogenization; return membrane to Nalgene tube and fill to fill line with 0.1 M FB; Centrifuge a 3rd time at 39,800 xg (17 k rpm) for 45 minutes at 4° C. Remove supernatant fraction and store pellet at −80° C. (SC).

[0331] Suspend pellets in 0.1 M FB; dounce homogenize with 5 strokes of a Type B/tight fit pestle (glass homogenizer); determine protein concentrations via Bradford assay; if desired, adjust concentration with 0.1 M FB; aliquot mem preparations, freeze on dry ice and store at 80° C.

### Binding FACS

[0332] Binding of the ISVDs to cell-expressed Nav1.7α was detected via murine anti-Flag (Sigma, catalog #F1804). Briefly, cells were resuspended in FACS buffer (PBS, 10% FBS, NaN₃) and transferred to a 96-well V-bottom plate at 1×10 5 cells/well. Purified FLAG3-tagged ISVD was diluted in FACS buffer and added to the cells for 30 minutes at 4° C. ISVD binding was detected by resuspending the samples subsequently in 100 μL murine anti-Flag at 1 μg/mL and 100 μL APC-labelled goat anti-mIgG (Jackson ImmunoResearch, catalog #115-135-164). Prior to the read-out, the samples were resuspended in 1 μg/mL propidium iodide (Sigma, catalog #P4170) to exclude dead cells. Between each step, the cells were centrifuged for 5 minutes at 200 grams and washed with 100 μL/well FACS buffer. An alternative approach used PE-labelled goat anti-murine IgG (Jackson ImmunoResearch, catalog #115-116-071) as detection antibody and 5 nM TOPRO3 (Molecular probes, catalog #T3605) as dead dye.

[0333] Control antibodies were detected as follows. Murine anti-Nav1.7α mAb S68-6 (Abcam, catalog #ab85015) was detected by PE-conjugated goat anti-murine IgG (Jackson ImmunoResearch, catalog #115-116-071) after fixation and permabilization of the cells with FIX & PERM kit according to the manufacturer's instructions (ThermoFisher Scientific, catalog #GAS003). Rabbit anti-Nav1.5α pAb (Alomone Labs, catalog #ASC-013) was detected with PE-conjugated goat anti-rabbit IgG (Jackson ImmunoResearch, catalog #711-116-152) after fixation and permabilization of the cells with FIX & PERM kit according to the manufacturer's instructions (ThermoFisher Scientific, catalog #GAS003). Rabbit anti-human 4 pAb (ThermoFisher Scientific, catalog #PAS-24142) was detected with PE-conjugated goat anti-rabbit IgG (Jackson ImmunoResearch, catalog #711-116-152).

### Immunizations

[0334] After approval of the Ethical Committee of the faculty of Veterinary Medicine (University Ghent, Belgium) or the Ethical Committee of the Ablynx Camelid Facility (LA1400575), 3 camelids were immunized with a CMV-promoter based DNA vector encoding codon optimized huNav1.7α, followed by codon optimized huNav157 chimera 14 DNA and membrane extracts prepared from recombinant HEK293 cells expressing huNav1.7α together with Navβ1, Navβ2 and Navβ3 (as described above).

### Cloning of Heavy Chain-Only Antibody Fragment Repertoires and Preparation of Phage

[0335] Following the final immunogen injection, blood samples were collected. From these blood samples, peripheral blood mononuclear cells (PBMCs) were prepared using Ficoll-Hypaque according to the manufacturer's instructions (Amersham Biosciences, Piscataway, NJ, US). From the PBMCs, total RNA was extracted and used as starting material for RT-PCR to amplify the VHH/ISVD-encoding DNA segments, essentially as described in WO05044858. Subsequently, phages were prepared according to standard protocols (see for example the prior art and applications filed by Ablynx N.V. cited herein) and stored after filter sterilization at 4° C. for further use.

### Selection of Nav1.7α Specific ISVDs Via Phage Display

[0336] VHH repertoires obtained from all camelids and cloned as phage library were subjected for two or three consecutive selection rounds to proteoliposome (PL) (5 μg/mL) or amphipol (amphipathic surfactant for maintaining solubilized membrane proteins in detergent-free solutions, catalog #A835, Anatrace) preparations (5 μg/mL) derived from HEK293 cells recombinantly expressing huNav1.7α together with Navβ1, Navβ2, and Navβ3 subunits (β1-β2-β3). Each selection round was performed in the presence of the following competing agents: 100 μg/mL of in house produced membrane extracts from HEK293 cells and 100 nM each of recombinant Navβ1 (Abnova, catalog #H00006324-P01), Navβ2 (Sino Biological, catalog #13859-H02H) and Navβ3 (Sino Biological, catalog #13500-H02H). After antigen incubation of the libraries and extensive washing; bound phage were eluted with trypsin (1 mg/mL) for 15 minutes and then the protease activity was immediately neutralized by applying 0.8 mM protease inhibitor ABSF. As a control, selections with in-house produced membrane extracts from HEK293 cells or without antigen were performed in parallel. Phage outputs were used to infect E. coli TG1 for analysis of individual VHH clones. Periplasmic extracts were prepared according to standard protocols (see for example WO03035694, WO04041865, WO04041863, WO04062551).

### Generation of ISVD Expression Constructs

[0337] Sequence analysis of ISVDs from phage display selection outputs was done according to commonly known procedures (Pardon et al., Nat Protoc 9: 674 (2014)). ISVD-containing DNA fragments, obtained by PCR with specific combinations of forward FR1 and reverse FR4 primers each carrying a unique restriction site, were digested with the appropriate restriction enzymes and ligated into the matching cloning cassettes of ISVD expression vectors (described below). The ligation mixtures were then transformed to electrocompetent Escherichia coli TG1 (60502, Lucigen, Middleton, WI) cells which were then grown under the appropriate antibiotic selection pressure. Resistant clones were verified by Sanger sequencing of plasmid DNA (LGC Genomics, Berlin, Germany). Monovalent ISVDs were expressed in E. coli TG1 from a plasmid expression vector containing the lac promoter, a resistance gene for kanamycin, an E. coli replication origin and an ISVD cloning site preceded by the coding sequence for the OmpA signal peptide. In frame with the ISVD coding sequence, the vector codes for a C-terminal FLAG3 (or CMYC3) and HIS6 tag. The signal peptide directs the expressed ISVDs to the periplasmic compartment of the bacterial host.

[0338] Unless specified otherwise, the tested clones herein comprise the ISVD amino acid sequence shown for it in Table 56 further fused at the C-terminus to a FLAG-HIS6 polypeptide (SEQ ID NO: 56) or HIS6. The amino acid positions in the ISVDs disclosed herein are numbered according to the Kabat numbering scheme.

### Generic Expression and Purification of ISVDs

[0339] E. coli TG-1 cells containing the ISVD constructs of interest were grown for 2 hours at 37° C. followed by 29 hours at 30° C. in baffled shaker flasks containing “5052” auto-induction medium (0.5% glycerol, 0.05% glucose, 0.2% lactose+3 mM MgSO₄). Overnight frozen cell pellets from E. coli expression cultures are then dissolved in PBS (1/12.5^{th} of the original culture volume) and incubated at 4° C. for one hour while gently rotating. Finally, the cells were pelleted down once more, and the supernatant containing the proteins secreted into the periplasmic space was stored for further purification. HIS6-tagged ISVDs were purified by immobilized metal affinity chromatography (IMAC) on either Ni-Excel (GE Healthcare) or Ni-IDA/NTA (Genscript) resins with Imidazole (for the former) or acidic elution (for the latter) followed by a desalting step (PD columns with Sephadex G25 resin, GE Healthcare) and if necessary, gel filtration chromatography (Superdex column, GE Healthcare) in PBS.

### Example 2

[0340] Selective Binding to huNav1.7α.

[0341] Crude periplasmic extracts containing ISVDs from phage display selections (as described above) were screened in FACS for binding to huNav1.7α but not to huNav1.5a. Confirmatory binding FACS experiments with purified FLAG3-HIS6 tagged ISVD proteins revealed that the ISVDs all bind selectively to different stable cell lines expressing huNav1.7α and huNav157 chimera 14 (extracellular and transmembrane sequences of huNav1.7α, combined with intracellular sequences of huNav1.7α and huNav1.8α and the Navβ1, Navβ2, and Navβ3 subunits (see Table 8; FIG. 3A-FIG. 3I)), but not to cell lines expressing rhNav1.7α, huNav1.1α, huNav1.2α, huNav1.3α, huNav1.4α, huNav1.5α, huNav1.6α or huNav1.8α. For example, FIGS. 39A-39E show that F0103262CO2, F0103265B04, F0103275B05, F0103464B09, and F0103387G05 are specific for huNav1.7α with no binding to huNav1.1α, huNav1.2α, huNav1.3α, huNav1.4α, huNav1.5α, huNav1.6α or huNav1.8α. As used in Table 8, the drawings, and throughout the description, Navβ1, Navβ2, and Navβ3 are human homologs unless specifically identified otherwise.

TABLE 8

| | | | | HEK | | | |
|---|---|---|---|---|---|---|---|
| | | CHO | HEK | FlpIn | | HEK | CHO |
| | | FlpIn | FlpIn | huNav | HEK293 | FlpIn | FlpIn |
| | | huNav1.7α + | huNav1.7α + | 157chimera14 + | huNav1.7α + | huNav1.5α + | rhNav1.7α + |
| | SEQ | β1-β2- β3 | β1-β2- β3 | β1- β2-β3 | β1 | β1-β2- β3 | β1-β2- β3 |
| | ID | (SEQ ID NO: 3) | (SEQ ID NO: 3) | (SEQ ID NO: 20) | (SEQ ID NO: 44) | (SEQ ID NO: 22) | (SEQ ID NO: 3) |
| ID # | NO: | pEC50 [M] | pEC50 [M] | pEC50 [M] | pEC50 [M] | pEC50 [M] | pEC50 [M] |
| F0103262B06 | 30 | 1.9E−08 | 2.5E−08 | 1.6E−08 | 2.0E−08 | — | — |
| F0103262C02 | 31 | 3.2E−07 | 3.8E−07 | 4.7E−07 | 1.8E−07 | — | — |
| F0103265A11 | 32 | 6.6E−08 | 3.7E−08 | 3.4E−08 | 8.4E−09 | — | — |
| F0103265B04 | 33 | 5.4E−09 | 8.1E−09 | 8.5E−09 | 5.5E−09 | — | — |
| F0103275B05 | 34 | 2.7E−08 | 3.7E−08 | 3.9E−08 | 2.8E−08 | — | — |
| F0103362B08 | 35 | 1.1E−07 | 4.2E−08 | ND | 5.9E−08 | — | — |
| F0103387G04 | 36 | 1.9E−08 | 1.6E−08 | ND | 6.7E−09 | — | 2.1E−07 |
| F0103387G05 | 37 | ND | 3.1E−09 | 3.6E−09 | 1.2E−09 | — | — |
| F0103345D07 | 38 | 2.2E−08 | ND | ND | 1.2E−08 | — | — |
| F0103464B09 | 39 | 4.1E−09 | ND | ND | 4.1E−09 | — | 2.7E−08 |

Mean pEC50 ± standard deviation;
—, no binding observed;
ND, not determined

[0342] The amino acid sequences for the ten ISVDs (Nav1.7 binders) without the FLAG-HIS6 peptide (SEQ ID NO: 56) are shown in SEQ ID NO: 46, 47, 48, 49, 50, 51, 52, 53, 54, and 55, respectively.

### Example 3

[0343] Affinity maturation was used to further improve the functional potencies of selected ISVDs by means of in vitro affinity maturation. In addition, as none of the selected ISVDs is cross-reactive to rhNav1.7α (with the exception of the weakly cross-reactive ISVD F0103387G04), the same process was applied to improve the NHP cross-reactivity to enable in vivo proof of concept (POC) studies in rhesus monkeys. In vitro affinity maturation of ISVDs is a two-stage process that aims to improve binding-related properties like affinity, species cross-reactivity or potency. First, all CDR-based residues are systematically changed to every possible amino acid on a one-by-one basis. The resulting libraries of single site substitution variants pooled per CDR are then screened for improvement of the desired property after which the hits are identified by means of Sanger sequencing. The beneficial single site substitutions are then combined into a library of combinatorial variants which are evaluated for further improvement of the desired property, followed by Sanger sequencing of hits. The generation the DNA fragments encoding the ISVD variants is either outsourced to commercial providers GeneWiz (South Plainfield, NJ) or IDT (Coralville, IA) or performed in house using commonly known molecular biology techniques such as site-directed mutagenesis, overlap extension PCR and oligonucleotide gene assembly (In Vitro Mutagenesis Protocols, 2^{nd} Edition (2002), Jeff Braman ed., Humana Press, Totowa NJ).

### Affinity Maturation of F0103275B05 & F0103387G04

[0344] As ISVD F0103275B05 and rhNav1.7α cross-reactive F0103387G04 appear to be related ISVDs with highly similar CDRs (FIG. 4), it was decided to pursue these two ISVDs for affinity maturation in one and the same effort. A pooled single site saturation stage I library of F0103275B05 was constructed and crude periplasmic extracts of 2100 individual clones were prepared and screened in binding FACS to huNav1.7α and rhNav1.7α. Clones with a single mutation in CDR3, CDR2 or CDR1 residues showed an improved binding to rhNav1.7α, but much less so to huNav1.7α (FIG. 5).

[0345] The sequence analysis of 384 hits is summarized in Table 9. The stage I hits have substitutions in 7/10, 7/9, and 5/15 positions of respectively CDR1, CDR3 and CDR3. Interestingly, the substitutions in three of these positions (27, 28 and 53) recapitulate some of the differences between F0103275B05 and its rhNav1.7α cross-reactive relative F0103387G04 and thus bring additional confidence in the outcome of the stage I screening. These three substitutions were included in the design of the stage II combinatorial library (bottom row of Table 8), in which 11 positions were allowed to vary between the parental F0103275B05 and the highest ranked stage I hit residue. The stage II library thus captures 2¹¹=2048 different combinatorial variants.

TABLE 9
Summary sequence analysis of F0103275B05/F0103387G04 screening
stage I & design stage II affinity maturation libraries

| | | CDR1 | | | | | | | | | | CDR3 | | | | | | | | |
|---|---|---|---|---|---|---|---|---|---|---|---|---|---|---|---|---|---|---|---|---|
| Kabat # | | 26 | 27 | 28 | 29 | 30 | 31 | 32 | 33 | 34 | 35 | 50 | 51 | 52 | 53 | 54 | 55 | 56 | 57 | 58 |
| ′275B05 | | G | S | I | F | N | I | N | S | M | A | S | S | T | N | G | G | S | T | N |
| ′387G04 | | G | P | V | F | N | I | N | K | M | A | S | V | T | P | T | G | S | I | S |
| Rank | 1 | | P | V | | L | W | S | R | | R | Y | | | P | R | W | D | H | R |
| hits | 2 | | | | | W | | | W | | L | R | | | | | | R | W | |
| stage I | 3 | | | | | | | | V | | | V | | | | | | | | |
| | 4 | | | | | | | | Q | | | | | | | | | | | |

| | | | | | | | | | | | | | | | | | | | |
|---|---|---|---|---|---|---|---|---|---|---|---|---|---|---|---|---|---|---|---|
| Stage II design | G | P | V | F | NL | IW | N | SR | M | AR | SY | S | T | P | G | GW | SD | TW | N |

| | CDR3 | | | | | | | | | | | | | | |
|---|---|---|---|---|---|---|---|---|---|---|---|---|---|---|---|
| Kabat # | 93 | 94 | 95 | 96 | 97 | 98 | 99 | 100 | 100a | 100b | 100c | 100d | 100e | 101 | 102 |

| ′275B05 | | N | A | L | L | Q | P | S | I | Y | D | I | S | R | T | Y |
|---|---|---|---|---|---|---|---|---|---|---|---|---|---|---|---|---|
| ′387G04 | | N | A | L | L | Q | P | D | S | Y | S | N | T | R | T | Y |
| Rank | 1 | W | W | | | | T | | | | | | | | I | |
| hits | 2 | D | W | E | | | | | | | | | | | K | |
| stage I | 3 | | G | | | | | | | | | | | | F | |
| | 4 | | | | | | | | | | | | | | | |

| | | | | | | | | | | | | | | | |
|---|---|---|---|---|---|---|---|---|---|---|---|---|---|---|---|
| Stage II design | NR | AW | L | L | Q | P | S | I | T | D | I | S | R | TI | Y |

′274B05 = F0103275B05;
′387G04 = F0103387G04

[0346] Crude periplasmic of 2100 clones of the stage II combinatorial library were prepared and screened in binding FACS on huNav1.7α and rhNav1.7α. A large fraction of the variants displayed improved binding to rhNav1.7α compared to the huNav1.7α-selective parental F0103275B05 (FIG. 6), indicating that the library design successfully captured and improved the promise of the stage I library. No improvements for binding to huNav1.7α were observed for stage II, in line with the observations during stage I. The sequence analysis of 300 hits is summarized in Table 10. Compared to a randomly picked reference sample, the top 25% of the hits are enriched for the N93R substitution but display a lower proportion of the N30L, I31W, A35R, G55W and T57W substitutions. Compared to a randomly picked reference sample, the bottom 25% of the hits displayed a lower proportion of the I31W and A35R substitutions. An analysis of the subset of the top 25% hits that did not carry the N93R mutation revealed that these were enriched for the S33R, S50Y and S56D substitutions and had a lower proportion of A94W, compared to the reference sample.

TABLE 10
Summary sequence analysis of F0103275B05 screening stage II affinity maturation libraries

| | CDR1 | | | | CDR2 | | | | CDR3 | | |
|---|---|---|---|---|---|---|---|---|---|---|---|
| Kabat # | N30L | I31W | S33R | A35R | S50Y | G55W | S56D | T57W | N93R | A94W | T101I |
| Reference | 47% | 44% | 51% | 39% | 40% | 43% | 47% | 47% | 42% | 53% | 56% |
| sample | | | | | | | | | | | |
| Top 25% of | 26% | 16% | 40% | 1% | 53% | 11% | 46% | 24% | 77% | 44% | 47% |
| hits | | | | | | | | | | | |
| Bottom 25% | 43% | 25% | 46% | 10% | 51% | 42% | 48% | 54% | 46% | 48% | 42% |
| of hits | | | | | | | | | | | |
| Top 25% of | 31% | 6% | 88% | 6% | 63% | 19% | 56% | 38% | NA | 19% | 50% |
| hits with N93 | | | | | | | | | | | |

NA, not applicable

[0347] A number of combinatorial affinity maturation variants of F0103275B5 were then characterized in detail in binding FACS and electrophysiology (Table 11). All variants bound rhNav1.7α, many with greater affinity than F01033387G04. This was confirmed for most of them in 2-pulse (FIG. 7B) and single pulse (FIG. 7A) electrophysiology experiments. A subset of variants is equipotent on huNav1.7α and rhNav1.7α, with binding EC₅₀ values of ±20 nM. The minimal number of mutations to a achieve this is four (S33R, S50Y, S56D and N93R) as exemplified by F010301461. F0103387G04 remains the best binder to huNav1.7α, most likely due to differences compared to F0103275B05 in other CDR positions. Variant F010300659 was the first variant with good rhNav1.7α cross-reactivity to be characterized, and as such was selected for in vivo assessment.

TABLE 11
Summary binding and functional characterization of F01033275B05 affinity variants
Part 1

| | Kabat # (mutations vs. F01033275B05) | | | | | | | | | | | |
|---|---|---|---|---|---|---|---|---|---|---|---|---|
| ID # | S27 | I28 | I31 | S33 | S50 | N53 | G55 | S56 | T57 | N93 | A94 | T101 |
| F010300948 | P | V | . | R | . | P | . | . | . | R | W | I |
| F010301462 | P | V | . | R | Y | P | . | D | . | R | . | . |
| F010301459 | P | V | . | R | . | P | . | D | . | R | . | . |
| F010301461 | . | . | . | R | Y | . | . | D | . | R | . | . |
| F010300900 | P | V | . | R | . | P | . | D | . | R | W | I |
| F010300880 | P | V | . | R | . | P | . | D | . | R | W | . |
| F010301460 | P | V | . | R | Y | P | . | . | . | R | . | . |
| F010300990 | P | V | . | R | Y | P | . | . | . | . | . | I |
| F010301000 | P | V | . | R | Y | P | . | D | . | . | . | I |
| F010300468 | . | . | . | . | . | . | . | . | . | R | . | . |
| F010300796 | P | V | . | R | Y | P | . | D | . | . | . | . |
| F010300631 | P | V | . | . | Y | P | . | . | . | R | . | . |
| F010300684 | P | V | W | . | . | P | . | . | . | R | . | I |
| F010300659 | P | V | . | . | Y | P | W | D | W | R | W | . |
| F0103387G04 | P | V | . | . | . | P | . | . | . | . | . | . |
| F010300477 | . | . | . | . | . | . | . | . | . | . | W | . |
| F010300316 | . | . | . | . | . | . | . | . | W | . | . | . |
| F0103275B05 | . | . | . | . | . | . | . | . | . | . | . | . |

Part 2

| | | | | HEK | |
|---|---|---|---|---|---|
| | CHO FlpIn | HEKa/β1 | | rhNav1.7α + β1- | |
| | rhNav1.7α + β1- | (SEQ ID NO: 40) | HEKa | β2-β3 | HEKa/β1 |
| | β2-β3 | Nav1.7 | huNav1.70α | (SEQ ID NO: 4) | (SEQ ID NO: 40) |
| | (SEQ ID NO: 4) | (SEQ ID NO: 1) | (SEQ ID NO: 1) | single pulse | single pulse |
| ID # | EC50 [M] | EC50 [M] | EC50 [M] | IC50 [M] | IC50 [M] |
| F010300948 | 2.0E−08 | 6.8E−08 | 6.9E−08 | 5.8E−08 | 3.2E−07 |
| F010301462 | 2.3E−08 | 2.2E−08 | 3.5E−08 | ND | ND |
| F010301459 | 2.3E−08 | 1.8E−08 | 2.2E−08 | ND | ND |
| F010301461 | 2.4E−08 | 2.1E−08 | 2.8E−08 | ND | ND |
| F010300900 | 2.5E−08 | 7.0E−08 | 2.0E−08 | 3.6E−08 | 2.0E−07 |
| F010300880 | 2.6E−08 | 4.4E−08 | 1.5E−08 | 1.2E−07 | 2.7E−08 |
| F010301460 | 3.2E−08 | 2.6E−08 | 1.5E−08 | ND | ND |
| F010300990 | 3.8E−08 | 6.5E−08 | 4.3E−09 | 1.0E−07 | 2.5E−07 |
| F010301000 | 4.0E−08 | 6.0E−08 | 8.5E−09 | ND | ND |
| F010300468 | 4.0E−08 | ND | ND | ND | ND |
| F010300796 | 4.4E−08 | 3.8E−08 | 5.8E−09 | ND | ND |
| F010300631 | 4.5E−08 | ND | ND | 1.7E−07 | 7.3E−08 |
| F010300684 | 5.0E−08 | ND | ND | 2.1E−07 | 2.0E−07 |
| F010300659 | 5.5E−08 | 2.7E−08 | 9.7E−09 | 1.8E−07 | 8.5E−08 |
| F0103387G04 | 1.5E−07 | 6.7E−09 | 3.2E−09 | ND | ND |
| F010300477 | 1.7E−07 | ND | ND | 1.2E−06 | 9.6E−08 |
| F010300316 | 1.7E−07 | ND | ND | ND | ND |
| F0103275B05 | — | 4.8E−08 | 1.0E−08 | ND | ND |

Part 3

| | |
|---|---|
| huNav1.7α | rhNav1.7α |
| (SEQ ID NO: 1) | (SEQ ID NO: 2) |
| 2-pulse IC50 [M] | 2-pulse IC50 [M] |

| ID # | P1 | P2 | P1 | P2 |
|---|---|---|---|---|
| F010300948 | ND | ND | ND | ND |
| F010301462 | ND | ND | ND | ND |
| F010301459 | ND | ND | ND | ND |
| F010301461 | ND | ND | ND | ND |
| F010300900 | ND | ND | ND | ND |
| F010300880 | ND | ND | ND | ND |
| F010301460 | ND | ND | ND | ND |
| F010300990 | ND | ND | ND | ND |
| F010301000 | ND | ND | ND | ND |
| F010300468 | 5.0E−06 | 4.0E−06 | 6.0E−06 | 3.0E−06 |
| F010300796 | ND | ND | ND | ND |
| F010300631 | 1.0E−06 | 8.0E−07 | 2.0E−06 | 8.0E−07 |
| F010300684 | 2.0E−06 | 2.0E−06 | 7.0E−06 | 1.0E−06 |
| F010300659 | 1.0E−06 | 8.0E−07 | 1.0E−06 | 7.0E−07 |
| F0103387G04 | 7.0E−07 | 4.0E−07 | 7.0E−06 | 3.0E−06 |
| F010300477 | 2.0E−06 | 2.0E−06 | 3.0E−06 | 1.0E−06 |
| F010300316 | 2.0E−06 | 1.0E−06 | 5.0E−06 | 4.0E−06 |
| F0103275B05 | ND | ND | ND | ND |

—, no binding detected; ND, not determined

### Affinity Maturation of F01033265A11

[0348] A pooled single site saturation library of F0103265A11 was constructed and crude periplasmic extracts of 1848 individual clones were prepared and screened in binding FACS on huNav1.7a and rhNav1.7α. Clones with a single mutation in CDR2, CDR3 or CDR1 residues showed an improved binding to huNav1.7α, but not to rhNav1.7α (FIG. 12).

[0349] The sequence analysis of 288 hits is summarized in Table 12. The stage I hits have substitutions in 3 of 10, 7 of 11, and 4 of 6 positions of respectively CDR1, CDR3 and CDR3. Of interest, four CDR2 positions (51, 53, 56 and 57) have substitutions to a Trp residue. The stage II library design captures 2 11=2048 different combinatorial variants.

TABLE 12
Summary sequence analysis of F0103265A11 screening stage
I & design stage II affinity maturation libraries

| | | CDR1 | | | | | | | | | | CDR2 | | | | |
|---|---|---|---|---|---|---|---|---|---|---|---|---|---|---|---|---|
| Kabat # | | 26 | 27 | 28 | 29 | 30 | 31 | 32 | 33 | 34 | 35 | 50 | 51 | 52 | 53 | 54 |
| F0103265A11 | | G | M | L | F | N | A | N | T | Q | G | F | I | F | S | G |
| Rank | 1 | | | K | | Y | R | | | | | | W | | W | |
| hits | 2 | | | | | L | | | | | | | | | | |
| stage I | 3 | | | | | R | | | | | | | | | | |
| | 4 | | | | | H | | | | | | | | | | |
| | 5 | | | | | F | | | | | | | | | | |

| | | | | | | | | | | | | | | | |
|---|---|---|---|---|---|---|---|---|---|---|---|---|---|---|---|
| Stage II design | G | M | L | F | NY | AR | N | T | Q | G | F | IW | F | SW | G |

| | | CDR2 | | | | | | CDR3 | | | | | |
|---|---|---|---|---|---|---|---|---|---|---|---|---|---|
| Kabat # | | 55 | 56 | 57 | 58 | 59 | 60 | 93 | 94 | 95 | 101 | 102 | 103 |
| F0103265A11 | | G | Y | T | N | Y | V | S | L | S | R | Y | L |
| Rank | 1 | M | W | R | T | | N | A | A | | V | | Q |
| hits | 2 | N | | V | S | | T | | | | L | | |
| stage I | 3 | | | W | A | | | | | | T | | |
| | 4 | | | | L | | | | | | | | |
| | 5 | | | | | | | | | | | | |

| | | | | | | | | | | | | |
|---|---|---|---|---|---|---|---|---|---|---|---|---|
| Stage II design | G | YW | TV | NT | Y | VN | SA | L | S | RV | Y | LQ |

[0350] Crude periplasmic of 2016 clones of the stage II combinatorial library were prepared and screened in binding FACS on huNav1.7α and rhNav1.7α. A large fraction of the variants displayed improved binding to huNav1.7α compared to the parental F0103265A11 (FIG. 9), indicating that the library design successfully captured and improved the promise of the stage I library. No improvements for binding to rhNav1.7α were observed for stage II, in line with the observations during stage I. The sequence analysis of 288 hits is summarized in Table 13. Compared to a randomly picked reference sample, the top 25% of the hits are enriched for the A31R, V60N and S93A substitutions but display a lower proportion of the N30Y, 151W, S53W, T57V and N58T substitutions. Compared to a randomly picked reference sample, the bottom 25% of the hits are enriched for the T57V, S93A and L103Q substitutions but display a lower proportion of the N30Y, I51W and S53W substitutions.

TABLE 13
Summary sequence analysis of F0103265A11 screening stage II affinity maturation libraries

| | CDR1 | | CDR2 | | | | | | CDR3 | | |
|---|---|---|---|---|---|---|---|---|---|---|---|
| Kabat # | N30Y | A31R | I51W | S53W | Y56W | T57V | N58T | V60N | S93A | R101V | L103Q |
| Reference | 22% | 30% | 27% | 37% | 30% | 45% | 55% | 37% | 38% | 18% | 55% |
| sample | | | | | | | | | | | |
| Top 25% of | 11% | 51% | 11% | 17% | 27% | 37% | 41% | 79% | 56% | 14% | 60% |
| hits | | | | | | | | | | | |
| Bottom 25% of | 11% | 30% | 11% | 25% | 25% | 56% | 51% | 41% | 62% | 27% | 68% |
| hits | | | | | | | | | | | |

[0351] A number of combinatorial affinity maturation variants of F0103265A11 were then characterized in detail in binding FACS and electrophysiology (Table 14). Most variants displayed clear improvements in binding EC50 and Bmax values on huNav1.7α, compared to parental F0103265A11. This became even more pronounced when huNav1.7α was expressed in the absence of Navβ-subunits: no binding was observed for parental 265A11, whereas many affinity maturation variants showed clear binding curves to the HEKa-only line. The previously observed β-subunit dependency of F0103265A11 was improved by the affinity maturation process. Clear improvements in functional inhibition of the ion channel were observed (last column of Table 14), compared to the marginal functional inhibition observed in the past for parental F0103265A11.

TABLE 14
Summary binding and functional characterization of F0103265A11 affinity variants
Part 1

| | Kabat # (mutations vs. F01033265A11) | | | | | | | | | | |
|---|---|---|---|---|---|---|---|---|---|---|---|
| ID # | N30 | A31 | I51 | S53 | Y56 | T57 | N58 | V60 | S93 | R101 | L103 |
| F010301458 | . | R | . | . | W | . | . | N | A | . | Q |
| F010301463 | . | R | . | . | . | . | . | N | A | . | Q |
| F010301080 | . | . | . | W | . | V | T | N | . | . | . |
| F010301129 | . | . | . | . | W | . | . | N | A | . | Q |
| F010301162 | . | R | . | . | W | . | . | N | . | . | Q |
| F010301191 | . | R | . | . | W | . | . | N | A | V | Q |
| F010301055 | . | . | . | W | . | V | . | . | . | . | . |
| F010301139 | . | R | W | . | . | V | . | N | . | . | Q |
| F010301090 | . | . | . | . | W | . | T | N | . | . | Q |
| F010301188 | . | R | . | . | . | . | . | N | . | . | Q |
| F010301175 | . | R | . | . | . | . | T | . | . | . | . |
| F010301111 | . | . | . | . | . | V | . | N | A | . | . |
| F010301059 | . | . | . | . | . | V | . | N | A | . | Q |
| F010300535 | . | . | . | W | . | . | . | . | . | . | . |
| F010301126 | . | R | . | . | . | V | T | N | . | . | . |
| F010301113 | . | R | . | . | . | . | . | N | . | V | Q |
| F010301099 | . | . | . | . | W | V | T | . | . | . | . |
| F010300536 | . | . | . | . | . | . | T | . | . | . | . |
| F010301232 | . | R | . | . | . | . | T | . | A | . | Q |
| F010301138 | Y | . | . | . | . | . | . | N | A | . | Q |
| F010300534 | . | . | . | . | . | V | . | . | . | . | . |
| F0103265A11 | . | . | . | . | . | . | . | . | . | . | . |

Part 2

| | | HEKa/β1 | | | |
|---|---|---|---|---|---|
| | | (SEQ ID | | | |
| | HEK FlpIn | NO: 40) | | HEKa | |
| | Nav1.7α + β1- | huNav1.7α | | Nav1.7α | HEKa/β1 |
| | β2-β3 | (SEQ ID | Bmax | (SEQ ID | (SEQ ID |
| | (SEQ ID NO: | NO: 1) | relative | NO: 1) | NO: 40) |
| ID # | 3) EC50 [M] | EC50 [M] | to ′535 | EC50 [M] | IC50 [M] |
| F010301458 | 4.1E−09 | 2.2E−09 | 120% | 8.6E−09 | ND |
| F010301463 | 4.3E−09 | 2.5E−09 | 120% | 2.9E−08 | ND |
| F010301080 | 5.1E−09 | 3.0E−09 | 122% | 2.6E−08 | 1.4E−08 |
| F010301129 | ND | 3.6E−09 | 103% | ND | 1.3E−07 |
| F010301162 | ND | 3.8E−09 | 115% | ND | 3.2E−08 |
| F010301191 | ND | 4.1E−09 | 119% | ND | 6.3E−08 |
| F010301055 | ND | 4.4E−09 | 117% | ND | ND |
| F010301139 | ND | 4.7E−09 | 117% | ND | ND |
| F010301090 | ND | 4.8E−09 | 102% | ND | 2.2E−08 |
| F010301188 | ND | 5.1E−09 | 104% | ND | ND |
| F010301175 | ND | 5.4E−09 | 111% | ND | ND |
| F010301111 | ND | 5.4E−09 | 99% | ND | ND |
| F010301059 | ND | 5.4E−09 | 99% | ND | ND |
| F010300535 | 1.6E−08 | 5.5E−09 | 100% | 7.2E−07 | ND |
| F010301126 | ND | 5.6E−09 | 118% | ND | ND |
| F010301113 | ND | 5.7E−09 | 111% | ND | ND |
| F010301099 | ND | 7.4E−09 | 87% | ND | ND |
| F010300536 | 2.7E−08 | 9.0E−09 | 77% | 6.6E−07 | ND |
| F010301232 | ND | 9.3E−09 | 112% | ND | ND |
| F010301138 | ND | 9.7E−09 | 107% | ND | ND |
| F010300534 | 7.2E−08 | 1.1E−08 | 62% | — | ND |
| F0103265A11 | 7.7E−08 | 1.1E−08 | 34% | — | ND |

—, no binding detected;
ND, not determined

### Affinity Maturation of F0103265B04

[0352] A pooled single site saturation library of F0103265B04 was constructed and crude periplasmic extracts of 2016 individual clones were prepared and screened in binding FACS on huNav1.7a and rhNav1.7α. No clones with a single mutation in CDR3, CDR2 or CDR1 residues showed an improved binding to huNav1.7a or rhNav1.7α (FIG. 10). The outliers in the top right quadrant of FIG. 10 was determined to be a contamination with F0103240B04, a 132 binding ISVD.

### Affinity Maturation of F0103387G05

[0353] A pooled single site saturation library of F0103387G05 was constructed and crude periplasmic extracts of 3360 individual clones were prepared and screened in binding FACS on huNav1.7α and rhNav1.7α. Clones with a single mutation of CDR2, CDR3 or CDR1 residues showed weakly improved binding to huNav1.7α, but not to rhNav1.7α (FIG. 11).

[0354] Sequence analysis of 384 hits revealed an enrichment for certain positions and mutations, but as there were no outspoken improvements in binding observed, it was decided to first characterize a number of stage I variants rather than combining these in a stage II combinatorial library. Binding FACS experiments (Table 15) revealed that most of the tested variants were comparable to parental F0103387G05. Interestingly, a number of CDR1- and CDR2-based (Kabat positions 23, 53, 54 and 58) mutations, all substitutions of Asp with Gly, displayed subtle improvements compared to parental F0103387G05. Combinations of these substitutions further improved the binding in a subtle way (Table 15). Combinations of these substitutions further improved the binding in a subtle way with D23A and D58G substitutions contributing the most (Table 15), resulting in the selection of F0103301563 as the preferred variant.

TABLE 15
Summary binding characterization of F0103387G05 affinity variants

| | | CHO FlpIn | HEKa/β1 | |
|---|---|---|---|---|
| | | huNav1.7α + | (SEQ ID NO: 40) | HEKa |
| | | β1-β2-β3 | huNav1.7α | huNav1.7α |
| | | (SEQ ID NO: 3) | (SEQ ID NO: 1) | (SEQ ID NO: 1) |
| ID # | Mutations vs. 387G05 | EC50 [M] | EC50 [M] | EC50 [M] |
| F010301559 | D23A, D54G, D58G | 1.8E−09 | 9.2E−10 | 8.7E−10 |
| F010301558 | D23A, D53G, D58G | 1.8E−09 | 9.3E−10 | 1.5E−09 |
| F010301563 | D23A, D58G | 1.9E−09 | 1.0E−09 | 1.5E−09 |
| F010301560 | D53G, D54G, D58G | 2.1E−09 | 1.1E−09 | 1.2E−09 |
| F010301565 | D53G, D58G | 2.1E−09 | 1.0E−09 | 1.4E−09 |
| F010301566 | D54G, D58G | 2.2E−09 | 1.0E−09 | 1.2E−09 |
| F010301556 | D23A, D53G, D54G, D58G | 2.3E−09 | 1.4E−09 | 1.8E−09 |
| F010301561 | D23A, D53G | 2.5E−09 | 1.2E−09 | 2.2E−09 |
| F010301562 | D23A, D54G | 2.5E−09 | 1.9E−09 | 1.2E−09 |
| F010301346 | D58G | 3.4E−09 | 1.6E−09 | 1.5E−09 |
| F010301564 | D53G, D54G | 3.5E−09 | 2.4E−09 | 1.9E−09 |
| F010301350 | D58V | 3.5E−09 | 1.7E−09 | 1.6E−09 |
| F010301314 | D23A | 3.5E−09 | 1.8E−09 | 1.9E−09 |
| F010301557 | D23A, D53G, D54G | 3.8E−09 | 2.1E−09 | 2.0E−09 |
| F010301367 | D53G | 4.2E−09 | 1.9E−09 | 2.2E−09 |
| F010301344 | D54G | 4.2E−09 | 2.1E−09 | 1.3E−09 |
| F010301372 | S100dG | 4.5E−09 | 2.3E−09 | 2.5E−09 |
| F010301445 | S100dY | 4.6E−09 | 2.0E−09 | 2.3E−09 |
| F0103387G05 | | 4.7E−09 | 1.7E−09 | 2.7E−09 |
| F010301418 | Y102W | 4.9E−09 | ND | ND |
| F010301328 | T57V | 5.0E−09 | ND | ND |
| F010301409 | H100fV | 5.1E−09 | ND | ND |
| F010301387 | V100A | 5.2E−09 | ND | ND |
| F010301360 | A56T | 5.2E−09 | ND | ND |
| F010301309 | L29V | 5.4E−09 | ND | ND |
| F010301313 | R35K | 5.5E−09 | ND | ND |
| F010301304 | I31W | 5.7E−09 | ND | ND |
| F010301440 | G100hT | 5.7E−09 | ND | ND |
| F010301301 | I31T | 7.3E−09 | ND | ND |
| F010301335 | R50V | 7.9E−09 | ND | ND |
| F010301425 | G100bV | 1.5E−08 | ND | ND |
| F010301416 | T101Q | — | ND | ND |

—, no binding detected;
ND, not determined

### Affinity Maturation of F0103362B08

[0355] A pooled single site saturation library of F0103362B08 was constructed and crude periplasmic extracts of 4032 individual clones were prepared and screened in binding FACS on huNav1.7α and rhNav1.7α. Clones with a single mutation of CDR2, CDR3 or CDR1 residues showed weakly improved binding to huNav1.7α, but not to rhNav1.7α (FIG. 12).

[0356] Sequence analysis of 326 hits revealed an enrichment for certain positions and mutations, but as there were no outspoken improvements in binding observed, it was decided to first characterize a number of stage I variants rather than combining these in a stage II combinatorial library. Binding FACS experiments (Table 16) revealed that most of the tested variants were comparable to parental F0103362B8. A number of mutations (Kabat positions 50, 97, 99 and 1000, consistently displayed subtle improvements compared to parental 362B08 across two different huNav1.7α cell lines.

TABLE 16
Summary binding characterization of F0103362B08 affinity variants

| | | CHO FlpIn | HEKa/β1 | |
|---|---|---|---|---|
| | | huNav1.7α + | (SEQ ID NO: 40) | HEKa |
| | | β1-β2-β3 | huNav1.7α | huNav1.7α |
| | | (SEQ ID NO: 3) | (SEQ ID NO: 1) | (SEQ ID NO: 1) |
| ID # | Mutations vs. 362B08 | EC50 [M] | EC50 [M] | EC50 [M] |
| F010301595 | D97A | 6.2E−08 | 1.7E−08 | ND |
| F010301606 | Y100fK | 6.5E−08 | 2.4E−08 | ND |
| F010301627 | G50A | 7.6E−08 | 2.3E−08 | ND |
| F010301598 | G99Q | 8.9E−08 | 2.9E−08 | ND |
| F010301607 | Y100fA | 9.0E−08 | 3.0E−08 | ND |
| F010301591 | G99K | 9.3E−08 | 4.3E−08 | ND |
| F010301574 | G35A | 1.0E−07 | 2.9E−08 | ND |
| F010301594 | R100aK | 1.1E−07 | 2.9E−08 | ND |
| F010301584 | W52aT | 1.1E−07 | 4.2E−08 | ND |
| F010301593 | R96K | 1.1E−07 | 4.0E−08 | ND |
| F010301585 | V56P | 1.1E−07 | 5.3E−08 | ND |
| F010301567 | F29Y | 1.1E−07 | 2.4E−08 | ND |
| F0103362B08 | | 1.1E−07 | 3.4E−08 | 1.9E−08 |
| F010301578 | S30G | 1.2E−07 | 3.0E−08 | ND |
| F010301629 | G50S | 1.2E−07 | 4.2E−08 | ND |
| F010301589 | I55P | 1.2E−07 | 4.1E−08 | ND |
| F010301579 | R27K | 1.3E−07 | 3.6E−08 | ND |
| F010301596 | G99A | 1.4E−07 | 5.0E−08 | ND |
| F010301621 | Y100fG | 1.5E−07 | 3.4E−08 | ND |
| F010301617 | F100cQ | 1.7E−07 | 4.4E−08 | ND |
| F010301586 | W52aA | 1.7E−07 | 5.1E−08 | ND |
| F010301612 | Y100fT | 1.7E−07 | 4.4E−08 | ND |
| F010301622 | Y100fD | 1.7E−07 | 4.0E−08 | ND |
| F010301580 | R27T | 1.8E−07 | 3.5E−08 | ND |
| F010301619 | F100cK | 1.8E−07 | 4.7E−08 | ND |
| F010301618 | Y102H | 1.9E−07 | 3.9E−08 | ND |
| F010301609 | Y100fQ | 1.9E−07 | 3.7E−08 | ND |
| F010301604 | R100aQ | 1.9E−07 | 5.2E−08 | ND |
| F010301592 | R100aS | 2.0E−07 | 6.7E−08 | ND |
| F010301568 | G35T | 3.1E−07 | 1.1E−07 | ND |
| F010301657 | A14P, D97A, G99Q, Y100fK | ND | 1.6E−08 | 2.0E−08 |
| F010301658 | A14P, G50A, D97A, G99Q, Y100fK | ND | 2.0E−08 | 2.3E−08 |
| F010301659 | A14P, G50A, D97A | ND | 1.2E−08 | 1.1E−08 |
| F010301661 | A14P, G50A, Y100fK | ND | 1.8E−08 | 1.6E−08 |
| F010301662 | A14P, D97A, G99Q | ND | 1.7E−08 | 1.9E−08 |
| F010301663 | A14P, D97A, Y100fK | ND | 1.4E−08 | 1.3E−08 |
| F010301664 | A14P, G99Q, Y100fK | ND | 1.8E−08 | 1.3E−08 |
| F010301665 | A14P, G50A, D97A, Y100fK | ND | 1.1E−08 | 8.8E−09 |
| F010301666 | A14P, G50A, G99Q, Y100fK | ND | 1.4E−08 | 1.0E−08 |

ND, not determined

### Affinity Maturation of F0103464B09

[0357] A pooled single site saturation library of F0103464B09 was constructed and crude periplasmic extracts of 3356 individual clones were prepared and screened in binding FACS on huNav1.7α and rhNav1.7α. Clones with a single mutation of mainly CDR2 residues showed weakly improved binding to rhNav1.7α, but hardly not to huNav1.7α (FIG. 13).

[0358] Sequence analysis of 186 hits revealed an enrichment for certain positions and mutations, particularly in CDR1 and CDR2. It was decided to first characterize a number of stage I variants based on their sequence enrichment in the hits and/or improved binding vs. parental controls (Table 17). Compared to parental F0103464B09, a number of the tested substitutions clearly improved binding to rhNav1.7α in terms of Bmax while being neutral for binding to huNav1.7α.

TABLE 17
Summary binding characterization of F0103464B09 affinity variants

| | | CHO FlpIn | CHO FlpIn | CHO FlpIn |
|---|---|---|---|---|
| | | rhNav1.7α + | rhNav1.7α + | huNav1.7α + |
| | | β1-β2-β3 | β1-β2-β3 | β1-β2-β3 |
| | Mutations vs. | (SEQ ID NO: 4) | (SEQ ID NO: 4) | (SEQ ID NO: 3) |
| ID # | F103464B09 | EC50 [M] | Bmax | EC50 [M] |
| F010301892 | V33L | 9.1E−09 | 100% | 4.E−09 |
| F010301885 | N53E | 1.8E−08 | 100% | 8.0E−09 |
| F010301881 | G54W | 5.8E−09 | 99% | 4.2E−09 |
| F010301888 | S26H | 8.7E−09 | 95% | 5.3E−09 |
| F010301889 | S95A | 8.5E−09 | 92% | 5.4E−09 |
| F010301878 | G54E | 2.7E−08 | 83% | 7.1E−09 |
| F010301886 | N58Q | 1.5E−08 | 81% | 4.3E−09 |
| F010301867 | A28Q | 2.2E−08 | 74% | 4.8E−09 |
| F010301880 | G54S | 2.4E−08 | 73% | 4.9E−09 |
| F010301890 | T35V | 2.0E−08 | 58% | 5.0E−09 |
| F0103464B09 | | 3.3E−08 | 54% | 5.4E−09 |
| F010301887 | R31Q | 5.9E−08 | 51% | 7.5E−09 |
| F010301883 | I51V | 3.4E−08 | 48% | 4.8E−09 |
| F010301884 | N53A | 5.0E−08 | 47% | 6.0E−09 |
| F010301891 | T57V | 2.6E−08 | 45% | 4.7E−09 |
| F010301882 | I30V | 4.1E−08 | 43% | 4.5E−09 |
| F010301879 | G54Q | ND | ND | ND |

ND, not determined

[0359] Based on these observations, a combinatorial library was generated with a diversity of 320 different variants, as summarized by Table 17. Crude periplasmic of 2880 clones of the stage II combinatorial library were prepared and screened in binding FACS on huNav1.7α and rhNav1.7α. A large fraction of the variants display improved binding to rhNav1.7α compared to the parental F0103464B09 (FIG. 14), indicating that the library design successfully captured and improved the promise of the stage I library. No outspoken improvements for binding to huNav1.7α were observed for stage II, in line with the observations during stage I.

[0360] The sequence analysis of 273 hits (per 96-well plate, each time top three hits on huNav1.7α and top seven hits on rhNav1.7α) is summarized in Table 18. Compared to a randomly picked reference sample, the V33L, G54W and S95A substitutions are underrepresented in the top three hits on huNav1.7α and rhNav1.7α. As such, the variants with these substitutions were excluded from further analysis. Furthermore, 38/96 (40%) of the top 3 hits on huNav1.7α matched the parental F0103464B09 sequence, again suggesting that no major improvements on huNav1.7α could be expected from this library. As no outspoken sequence enrichments could be observed from Table 18, the following criteria were applied to further narrow down the number of variants for detailed characterization:
[0361] sequenced multiple times and at least once present in both top 2 hits on huNav1.7α and rhNav1.7α;
[0362] no deamidation motif on position 53;
[0363] less than 5 mutations compared to parental F0103464B09.
   The resulting combinatorial variants (Table 19) were supplemented with one variant carrying V33L substitution, as this is one of the most promising single substitutions (Table 17). These variants were combined with a two variable sequence optimization substitutions R39Q and A63V in a background containing a large number of sequence optimization substitutions (L11V, T24A, T25S, V40A, E44Q, F62S, S68T, M77T, T79Y, R81Q, S82aN, N82bS, K83R, G88A, V89L, N99S).

TABLE 18
Summary sequence analysis of F103464B09 screening stage II affinity maturation libraries

| | CDR1 | | | CDR2 | | | | | | CDR3 |
|---|---|---|---|---|---|---|---|---|---|---|
| Kabat # | S26H | A28Q | V33L | N53E | G54W | G54E | G54S | G54Q | N58Q | S95A |
| Reference | 55% | 41% | 48% | 48% | 10% | 24% | 28% | 21% | 72% | 52% |
| sample | | | | | | | | | | |
| Top 3 hits | 47% | 58% | 4% | 42% | 0% | 20% | 29% | 11% | 62% | 9% |
| on huNav1.7 | | | | | | | | | | |
| Top 3 hits | 51% | 58% | 19% | 31% | 1% | 21% | 19% | 15% | 85% | 36% |
| on rhNav1.7 | | | | | | | | | | |

TABLE 19
Summary of selected F103464B09 affinity variants

| | Kabat # (mutations vs. F103464B09) | | | | | |
|---|---|---|---|---|---|---|
| ID | S26 | A28 | V33 | N53 | G54 | N58 |
| A28Q G54E | . | Q | . | . | E | . |
| A28Q G54E N58Q | . | Q | . | . | E | Q |
| A28Q N53E G54S N58Q | . | Q | . | E | S | Q |
| S26H A28Q G54E N58Q | H | Q | . | . | E | Q |
| S26H A28Q N53E N58Q | H | Q | . | E | . | Q |
| S26H N53E G54S N58Q | H | . | . | E | S | Q |
| S26H N53E N58Q | H | . | . | E | . | Q |
| S26H V33L N53E G54S | H | . | L | E | S | . |

[0364] In the course of the F0103464B09 sequence optimization process subtle drops in binding to rhNav1.7α were observed for the following substitutions: R39Q, A63V, T79Y, R81Q, and N99S. R39Q substitution also resulted in a subtle drop in binding to huNav1.7α. The combination of these, as present in the background in which the combinatorial variation was introduced, resulted in the complete abolishment of binding to rhNav1.7α for the controls that do not carry any of the affinity maturation substitutions (F010302365, F010302366 and F010302368 in Table 20) and the same was observed for the variants combining the A28Q G54E substitutions. Less outspoken, none of the variants combining the A28Q G54E N58Q, S26H A28Q G54E N58Q, or A28Q N53E G54S N58Q substitutions reached maximum binding levels to rhNav1.7α (Table 20). A similar observation was made for the variants combining the S26H V33L N53E G54S substitutions, which also resulted in a drop in binding EC50 to huNav1.7α. The three remaining combinations S26H N53E N58Q, S26H N53E G54S N58Q and S26H A28Q N53E N58Q were highly comparable for their binding to huNav1.7α and rhNav1.7α (Table 20). The S26H N53E N58Q combination was then selected as it achieves the same binding improvements with one mutation less than the two others.

TABLE 20
Summary binding characterization of F0103464B09 combinatorial
affinity and sequence optimization variants
Part 1

| | Substitutions vs. F103464B09 (L11V, T24A, T25S, V40A, E44Q, F62S, | | | | | | | |
|---|---|---|---|---|---|---|---|---|
| | S68T, M77T, T79Y, R81Q, S82aN, N82bS, K83R, G88A, V89L, N99S) | | | | | | | |
| ID # | S26 | A28 | V33 | R39 | N53 | G54 | N58 | A63 |
| F010302365 | . | . | . | . | . | . | . | . |
| F010302368 | . | . | . | Q | . | . | . | V |
| F010302366 | . | . | . | Q | . | . | . | . |
| F010302341 | . | Q | . | Q | . | E | . | . |
| F010302357 | . | Q | . | Q | . | E | . | V |
| F010302333 | . | Q | . | . | . | E | . | . |
| F010302349 | . | Q | . | . | . | E | . | V |
| F010302364 | H | . | L | Q | E | S | . | V |
| F010302348 | H | . | L | Q | E | S | . | . |
| F010302356 | H | . | L | . | E | S | . | V |
| F010302340 | H | . | L | . | E | S | . | . |
| F010302339 | H | . | . | . | E | . | Q | . |
| F010302347 | H | . | . | Q | E | . | Q | . |
| F010302355 | H | . | . | . | E | . | Q | V |
| F010302363 | H | . | . | Q | E | . | Q | V |
| F010302337 | H | Q | . | . | E | . | Q | . |
| F010302345 | H | Q | . | Q | E | . | Q | . |
| F010302353 | H | Q | . | . | E | . | Q | V |
| F010302361 | H | Q | . | Q | E | . | Q | V |
| F010302334 | . | Q | . | . | . | E | Q | . |
| F010302342 | . | Q | . | Q | . | E | Q | . |
| F010302350 | . | Q | . | . | . | E | Q | V |
| F010302358 | . | Q | . | Q | . | E | Q | V |
| F010302336 | H | Q | . | . | . | E | Q | . |
| F010302344 | H | Q | . | Q | . | E | Q | . |
| F010302352 | H | Q | . | . | . | E | Q | V |
| F010302360 | H | Q | . | Q | . | E | Q | V |
| F010302338 | H | . | . | . | E | S | Q | . |
| F010302346 | H | . | . | Q | E | S | Q | . |
| F010302354 | H | . | . | . | E | S | Q | V |
| F010302362 | H | . | . | Q | E | S | Q | V |
| F010302335 | . | Q | . | . | E | S | Q | . |
| F010302343 | . | Q | . | Q | E | S | Q | . |
| F010302351 | . | Q | . | . | E | S | Q | V |
| F010302359 | . | Q | . | Q | E | S | Q | V |

Part 2

| | | | CHO FlpIn | CHO FlpIn |
|---|---|---|---|---|
| | CHO FlpIn | | rhNav1.7α + | rhNav1.7α + |
| | huNav1.7α + | CHO FlpIn | β1- β2-β3 | β1- β2-β3 |
| | β1-β2-β3 (SEQ | huNav1.7α + β1- | (SEQ ID | (SEQ ID |
| | ID NO: 3) | β2-β3 (SEQ ID | NO: 4) | NO: 4) |
| ID # | EC50 [M] | NO: 3) Bmax | EC50 [M] | Bmax |
| F010302365 | 3.1E−09 | 100% | — | — |
| F010302368 | 3.9E−09 | 100% | — | — |
| F010302366 | 3.7E−09 | 100% | — | — |
| F010302341 | 5.3E−09 | 100% | — | — |
| F010302357 | 5.3E−09 | 100% | — | — |
| F010302333 | 4.1E−09 | 100% | — | — |
| F010302349 | 4.4E−09 | 100% | — | — |
| F010302364 | 7.2E−09 | 100% | 1.7E−08 | 74% |
| F010302348 | 6.7E−09 | 100% | 1.4E−08 | 95% |
| F010302356 | 5.3E−09 | 100% | 1.2E−08 | 81% |
| F010302340 | 4.6E−09 | 100% | 1.3E−08 | 96% |
| F010302339 | 4.3E−09 | 100% | 6.8E−09 | 100% |
| F010302347 | 4.6E−09 | 100% | 9.6E−09 | 100% |
| F010302355 | 3.5E−09 | 100% | 6.8E−09 | 97% |
| F010302363 | 4.2E−09 | 100% | 9.3E−09 | 96% |
| F010302337 | 3.9E−09 | 100% | 6.8E−09 | 100% |
| F010302345 | 4.9E−09 | 100% | 1.2E−08 | 96% |
| F010302353 | 4.2E−09 | 100% | 7.9E−09 | 93% |
| F010302361 | 4.8E−09 | 100% | 1.1E−08 | 92% |
| F010302334 | 4.0E−09 | 100% | 1.1E−08 | 70% |
| F010302342 | 4.0E−09 | 100% | 1.6E−08 | 61% |
| F010302350 | 3.5E−09 | 100% | 1.5E−08 | 46% |
| F010302358 | 4.5E−09 | 100% | 3.7E−08 | 37% |
| F010302336 | 3.6E−09 | 100% | 9.7E−09 | 79% |
| F010302344 | 4.3E−09 | 100% | 1.3E−08 | 78% |
| F010302352 | 3.6E−09 | 100% | 1.1E−08 | 60% |
| F010302360 | 3.5E−09 | 100% | 1.5E−08 | 58% |
| F010302338 | 3.4E−09 | 100% | 7.9E−09 | 100% |
| F010302346 | 5.0E−09 | 100% | 1.2E−08 | 99% |
| F010302354 | 4.2E−09 | 100% | 7.9E−09 | 96% |
| F010302362 | 5.4E−09 | 100% | 1.4E−08 | 89% |
| F010302335 | 4.1E−09 | 100% | 1.3E−08 | 84% |
| F010302343 | 6.4E−09 | 100% | 1.8E−08 | 84% |
| F010302351 | 5.6E−09 | 100% | 1.5E−08 | 72% |
| F010302359 | 6.4E−09 | 100% | 2.4E−08 | 66% |

### Example 4

[0365] Competitive Binding to huNav1.7α

[0366] Competition FACS assays were performed with CMYC3-tagged ISVD F0103265B04 or F0103275B05(N93R) affinity maturation variant on a HEK FlpIn huNav1.7α+β1−β2−β3 transgenic cell line. Briefly, cells were resuspended in FACS buffer (PBS, 2% FBS, 0.05% NaN₃) and 1×10⁵ cells/well were transferred to 96-well V-bottom plates. Cells were subsequently resuspended in a 100 μL mixture of purified ISVD (dilution series) and CMYC3-tagged ISVD F0103265B04 (at a concentration equivalent to EC30) followed by incubation for 1.5 hours at 4° C. Residual binding of CMYC3-tagged ISVD F0103265B04 was detected with 1004 murine anti-CMYC (1/250 dilution) (Bio-Rad, catalog #MCA2200) followed by PE-conjugated goat anti-murine (Jackson Immunoresearch, catalog #115-116-071). Between each step, the cells were centrifuged for 5 minutes at 200 g and washed with 100 μL/well FACS buffer. Prior to the read-out, the samples were resuspended in 5 nM TOPRO3 (Molecular probes, catalog #T3605) to exclude dead cells. F0103262CO2, F0103262B06, F0103265A11, F0103265B04, F0103275B05, F0103362B08, and F0103387G04 all compete with F0103265B04 for binding to huNav1.7α, in contrast to an irrelevant control ISVD (IRR) (see Table 21 and FIG. 15A, FIG. 15B, FIG. 15C, and FIG. 15D). The data shown in the figures and summarized in Table 20 suggests that all extracellular anti-Nav1.7α leads bind to an overlapping footprint.

TABLE 21

| | HEK FlpIn | CHO FlpIn | CHO FlpIn |
|---|---|---|---|
| | huNav1.7α + | huNav1.7α + | rhNav1.7α + |
| | β1-β2-β3 | β1-β2-β3 | β1-β2-β3 |
| | (SEQ ID NO: 3) | (SEQ ID NO: 3) | (SEQ ID NO: 4) |
| | vs. EC30 of | vs. EC25 of | vs. EC40 of |
| | F103265B04 | F103275B05(N93R) | F103275B05(N93R) |
| ID # | IC50 [M] | IC50 [M] | IC50 [M] |
| F0103262C02 | 5.3E−07 | ND | ND |
| F0103262B06 | 4.9E−08 | ND | ND |
| F0103275B05 | 9.8E−08 | ND | ND |
| F0103265B04 | 1.8E−08 | ND | ND |
| F0103265A11 | 7.5E−08 | ND | ND |
| F0103362B08 | 1.5E−07 | ND | ND |
| F0103387G05 | 9.4E−09 | 1.0E−08 | — |
| F0103387G04 | 5.9E−08 | ND | ND |
| F0103464B09 | ND | 1.2E−08 | 7.9E−08 |
| F0103454D07 | ND | 5.8E−08 | — |

ND, not determined

### Example 5

[0367] Binding to huNav1.7α-Nav1.5 Chimeras

[0368] FACS binding studies (as described above) were performed on HEK293T cells transiently transfected with expression vectors encoding a huNav1.7α or rhNav1.7α fused at the C-terminus via a P2A viral peptide linker to a single polypeptide encoding sodium channel beta subunits Navβ1, Navβ2, and Navβ3 in tandem (β1-β2-β3; SEQ ID NO:21). Similarly, HEK293T cells transiently transfected with expression vectors encoding chimeric variants of huNav1.7α in which individual domains are replaced by their huNav1.5α counterparts (chimeras 1 to 4 in FIG. 16) or with chimeric variants of huNav1.5 in which individual domains are replaced by their huNav1.7α counterparts (chimeras 5 to 8 in FIG. 16) fused at the C-terminus via a P2A viral peptide linker to β1-β2-β3 as above. See Table 7 for description of the expression vectors encoding the chimeras, Table 21 and FIG. 16).

[0369] From experiments summarized in Table 22 and shown in FIG. 17A-FIG. 17C and FIG. 18A-18C, it could be concluded that DI of huNav1.7α is necessary and sufficient for the binding of F0103262CO2, F0103262B06, F0103265B04, F0103275B05, and F0103265A11 (see FIG. 16). From a separate experiment (Table 22 and FIGS. 19A-19B) with a chimeric variant of huNav1.7α in which the DI S5-S6 sequence is replaced by the huNav1.5 counterpart (chimera 12 in FIG. 16), it could be concluded that DI S5-S6 is necessary for the binding of F0103262CO2, F0103262B06, F0103265B04, F0103275B05, and F0103265A11 to huNav1.7α. In addition, F0103275B05 appears to also interact with the adjoining DIV VSD (Table 22, FIGS. 17A-17C, FIGS. 18A-18C, and FIGS. 20A-20B). Control antibodies murine anti-Nav1.7α mAb S68-6 (Abcam, catalog #ab85015) and rabbit anti-Nav1.5α pAb (Alomone Labs, catalog #ASC-013) recognize an epitope at the intracellular C-terminal part of their respective channel.

TABLE 22

| | SEQ | | | | | | | | | | |
|---|---|---|---|---|---|---|---|---|---|---|---|
| | ID | DI | | | DII | | | DIII | | | DIV |
| ID # | NO: | S1-S2 | S3-S4 | S5-S6 | S1-S2 | S3-S4 | S5-S6 | S1-S2 | S3-S4 | S5-S6 | S1-S2 |
| huNav1.7α + β1- | 3 | | | | | | | | | | |
| β2-β3 | | | | | | | | | | | |
| huNav157chim1 + | 10 | | | | | | | | | | X |
| β1-β2-β3 | | | | | | | | | | | |
| huNav157chim2 + | 11 | | | | | | | X | X | X | |
| β1-β2-β3 | | | | | | | | | | | |
| huNav157chim3 + | 12 | | | | X | X | X | | | | |
| β1-β2-β3 | | | | | | | | | | | |
| huNav157chim4+ | 13 | X | X | X | | | | | | | |
| β1-β2-β3 | | | | | | | | | | | |
| huNav157chim5+ | 14 | X | X | X | X | X | X | X | X | X | |
| β1-β2-β3 | | | | | | | | | | | |
| huNav157chim6+ | 15 | X | X | X | X | X | X | | | | X |
| β1-β2-β3 | | | | | | | | | | | |
| huNav157chim7+ | 16 | X | X | X | | | | X | X | X | X |
| β1-β2-β3 | | | | | | | | | | | |
| huNav157chim8+ | 17 | | | | X | X | X | X | X | X | X |
| β1-β2-β3 | | | | | | | | | | | |
| huNav157chim9+ | 18 | | | | | | | | | | |
| β1-β2-β3 | | | | | | | | | | | |
| huNav157chim12 | 19 | | | X | | | | | | | |
| +β1-β2-β3 | | | | | | | | | | | |
| huNav157chim18 | 29 | | | | | | | | | | X |
| +β1-β2-β3 | | | | | | | | | | | |
| huNav157chim22 | 21 | | | | | | | | | | X |
| +β1-β2-β3 | | | | | | | | | | | |

| | DIV | | | | | | |
|---|---|---|---|---|---|---|---|
| ID # | S3-S4 | S5-S6 | F0103262C02 | F0103275B05 | F0103265B04 | F0103262B06 | F0103265A11 |
| huNav1.7α + β1- | | | + | + | + | + | ± |
| β2-β3 | | | | | | | |
| huNav157chim1 + | X | X | + | − | + | + | ± |
| β1-β2-β3 | | | | | | | |
| huNav157chim2 + | | | + | + | + | + | ± |
| β1-β2-β3 | | | | | | | |
| huNav157chim3 + | | | + | + | + | + | ± |
| β1-β2-β3 | | | | | | | |
| huNav157chim4+ | | | − | − | − | − | − |
| β1-β2-β3 | | | | | | | |
| huNav157chim5+ | | | − | − | − | − | − |
| β1-β2-β3 | | | | | | | |
| huNav157chim6+ | X | X | − | − | − | − | − |
| β1-β2-β3 | | | | | | | |
| huNav157chim7+ | X | X | − | − | − | − | − |
| β1-β2-β3 | | | | | | | |
| huNav157chim8+ | X | X | + | ± | + | + | ± |
| β1-β2-β3 | | | | | | | |
| huNav157chim9+ | | X | + | + | + | + | ± |
| β1-β2-β3 | | | | | | | |
| huNav157chim12 | | | − | − | − | − | − |
| +β1-β2-β3 | | | | | | | |
| huNav157chim18 | X | | + | ± | + | + | ± |
| +β1-β2-β3 | | | | | | | |
| huNav157chim22 | | | + | ± | + | + | ± |
| +β1-β2-β3 | | | | | | | |

X boxes, Nav1.5;
empty boxes, Nav1.7α;
+, strong binding;
± weak binding;
−, no binding

### Example 6

[0370] Binding to huNav1.7α-rhNav1.7α Chimeras

[0371] FACS binding studies (as described above) were performed on HEK293T cells transiently transfected with a chimeric variant of huNav1.7α in which all the huNav1.7α-rhNav1.7α polymorphisms of DI are present (N146S, V1941, F276V, R277Q, E281V, V331M, E504D, D507E, S508N, N533S). Replacing the huNav1.7α DI sequence for that of rhNav1.7α is sufficient to abolish the binding of F0103262CO2, F0103265B04, F0103262B06, and F0103265A11 to huNav1.7α, recapitulating the absence of binding on rhNav1.7α (see FIGS. 21A-21B).

[0372] Based on the huNav1.7α model (as described above) the following huNav1.7α-rhNav1.7α polymorphisms can be allocated to the extracellular part of DI: N146S, F276V, R277Q, E281V and V331M. The first of the residues is in DI S1-S2 whereas the latter four residues belong to DI S5-S6. FACS binding studies (as described above) were performed to stable CHO FlpIn cell lines expressing different variants of huNav1.7+β1−β2−β3 each including one of the four possible extracellular huNav1.7α-rhNav1.7α polymorphisms in the DI S5-S6 region: F276V, R277Q, E281V and V331M (Table 23 and FIGS. 22A-22F). Individual polymorphisms were each sufficient to abolish the binding of F0103265B04, F0103362B08, F010301080, and F0103262B06 to huNav1.7α, recapitulating the absence of binding on rhNav1.7α. F0103262CO2, F0103275B05 and F0103387G05 are more subtly affected in terms of EC50 or Bmax by some of the polymorphisms. None of the individual DI S5-S6 polymorphisms by themselves appear to have an impact on the binding of the two rhNav1.7α cross-reactive ISVDs F0103387G04 and F0103464B09. In addition, no effect on binding of the two ISVDs was observed (data not shown) for the three extracellular DIV VSD huNav1.7α-rhNav1.7α polymorphisms Q1530P, H1531Y and E1534D (FIG. 22G).

TABLE 23

| | | CHO | CHO | CHO | CHO | |
|---|---|---|---|---|---|---|
| | CHO | FlpIn | FlpIn | FlpIn | FlpIn | CHO |
| | FlpIn | huNav1.7α | huNav1.7α | huNav1.7α | huNav1.7α | FlpIn |
| | huNav1.7α + | (F276V) + | (R277Q) + | (E281V) + | (V331M) + | rhNav1.7α + |
| | β1-β2- | β1-β2-β3 | β1-β2-β3 | β1-β2-β3 | β1-β2- | β1-β2- |
| | β3 (SEQ | (SEQ ID | (SEQ ID | (SEQ ID | β3 (SEQ | β3 (SEQ |
| | ID NO: 3) | NO: 5) | NO: 6) | NO: 7) | ID NO: 8) | ID NO: 4) |
| ID # | EC50 [M] | EC50 [M] | EC50 [M] | EC50 [M] | EC50 [M] | EC50 [M] |
| F0103265B04 | 9.2E−09 | — | 7.1E−09 | 7.5E−09 | — | — |
| F0103362B08 | 4.3E−08 | 4.2E−08 | 3.4E−08 | 3.4E−08 | — | — |
| F0103262C02 | 2.9E−07 | 2.1E−07 | 4.5E−07 | 2.4E−07 | 8.6E−08 | — |
| F0103262B06 | 4.7E−08 | — | — | — | 6.3E−08 | — |
| F010301080* | 3.4E−09 | 2.6E−09 | 3.2E−09 | 2.5E−09 | — | — |
| F0103275B05 | 3.0E−08 | 2.6E−08 | 2.5E−08 | 2.4E−08 | 2.1E−08 | — |
| F0103387G04 | 1.1E−08 | 7.4E−09 | 7.1E−09 | 1.1E−08 | 4.9E−09 | 5.9E−07 |
| F0103387G05 | 2.6E−09 | 2.4E−09 | 2.2E−09 | 2.3E−09 | 5.9E−09 | — |
| F0103464B09 | 3.4E−09 | 2.7E−09 | 2.6E−09 | 2.7E−09 | 1.6E−09 | 3.1E−08 |

—, no binding;
*F0103265A11(S53W, T57V, N58T, V60N) affinity maturation variant

### Summary Epitope Mapping

[0373] The combined data of the binding studies on the huNav157 chimeras and the huNav1.7α-rhNav1.7α chimeras, together with the competition binding data suggests that the ISVDs recognize an overlapping epitope on the DI S5-S6 part of huNav1.7α, which can be further delineated by the extracellular human-rhesus polymorphisms in that part which can be further dissected out by the extracellular huNav1.7α-rhNav1.7α polymorphisms in that area or by additional contacts with the adjoining DIV VSD in the case of F0103275B05.

### Example 7

[0374] Electrophysiological characterization of Nav1.7α selective ISVDs on IonFlux 16 automated patch clamp system (Fluxion Biosciences, Inc., Alameda, CA).

### Solutions and ISVDs Handling

[0375] The extracellular solution contained (in mM): 138 NaCl, 4 KCl, 1.8 CaCl₂, 1 MgCl₂, 10 HEPES, 5.6 glucose (pH 7.2 with NaOH, and 285-290 mOsmolar). Intracellular solution contained (in mM): 5 NaCl, 100 CsF, 45 CsCl, 10 HEPES, 5 EGTA (pH 7.45 with CsOH, and 300-315 mOsmolar). These solutions were freshly made, filtered and stocked for no longer than 6 months at 4° C.

### Cell Preparation

[0376] HEK Flp-In and CHO Flp-In cells stably expressing the human Nav1.7α channel were generated. Cells were cultured in T-175 cell culture flasks (Greinerbio-one, catalog #660160) using standard cell culture conditions. CHO Flp-In culture medium consists of F12 nutrient mix (Gibco, catalog #31765) containing 10% FBS (Sigma-Aldrich, catalog #F7524), 0.8 mg/mL hygromycin B (Invitrogen, catalog #10687010). HEK Flp-In culture medium consists of DMEM Glutamax™ (Gibco, catalog #31966) containing 10% FBS (Sigma-Aldrich, catalog #F7524), 0.8 mg/mL hygromycin B (Invitrogen, catalog #10687010), 1% NEAA (Gibco, catalog #11140) and 1% Na-pyruvate (Gibco, catalog #11360). Cells were seeded at a density of 1.7×10 4 cells/cm 2 (Hek293 Flp-In) or 5.7×10 3 cells/cm 2 (CHO Flp-In) for 2 days before being used in the IonFlux 16 (Fluxion). Optimal cell confluence prior to harvesting never exceeded 80%. The cells were washed twice with d-PBS without Ca²⁺ and Mg²⁺(Gibco, catalog #14190) and detached with 4 mL Trypsin/EDTA 0.25% (Invitrogen, catalog #25200-056) for 5 to 10 min at 37° C. Medium containing 10% FBS is added to inactivate the enzymatic reaction triggered by the trypsin. Subsequently, the cells were counted (Casy TT, Roche) and centrifuged at 200×g during 2 min at RT in 50 mL conical CELLSTAR® tube (Greiner Bio-One, catalog #227-261) suspended at 1×10 6 cells/ml in CHO—S-SFMII (Gibco, catalog #12052) supplemented with 25 mM Hepes (Gibco, catalog #15630), transferred to a 25 mL cell culture flask (Greiner Bio-One, catalog #690190) and gently shaken at RT for approximately 20 min. 1×10 7 cells were centrifuged for 2 min at 200×g. The pellet is gently resuspended in 5 mL extracellular buffer and centrifuged a second time for 2 min at 200×g. Finally, the pellet is resuspended in 2000 μl extracellular buffer and immediately tested on the IonFlux.

### IonFlux Automated Patch Clamp Procedure

[0377] 250 μL of sterile cell culture grade water is dispensed into every well of the IonFlux 96-well plate except the outlet wells, using an eight channel multi-pipette. Any excess water on the rim of the plate is wiped off before rinsing the plate. The designated plate is inserted into the IonFlux system and subsequently rinsed 4 times according to a standard Water Rinse protocol. After rinsing, the plate is emptied. The inlet wells were then manually filled with extracellular buffer, trap wells with intracellular buffer and the diluted ISVDs or selective peptides were distributed into the compounds wells (250 μL/well). Subsequently, the plate is primed before the actual experiment according to the plate specific protocols. For population plates (Molecular Devices, catalog #910-0098): 1) traps and compounds at 5 psi for t=0-160 s and 2 psi for t=160-175 s, 2) traps but not compounds at two psi for t=175-180 s, and 3) main channel at 1 psi for t=0-160 s and 0.3 psi for t=162-180 s. For single cell plates (Molecular Devices, #910-0100): 1) traps but not compounds at eleven psi for t=0-350 s and 1.5 psi for t=625-630 2) traps and compounds at five psi for t=350-600 s and 1.5 psi for t=600-625 s, and 3) main channel at 0.5 psi for t=0-350 s and one psi for t=350-600 s, and 0.3 psi for t=600-627 s. After priming, the outlet and inlet wells were emptied and 250 μL of the prepared cell suspension (i.e. approximately one million cells) is distributed into the inlet wells of the designated plate. After introduction of the cells, the plate is reprimed: 1) traps and compounds at five psi for t=0-20 seconds and two psi for t=25-50 seconds, 2) traps not with compounds at two psi for t=50-55 seconds, and 3) main channel at one for t=0-30 seconds and 0.4 psi for t=30-55 seconds. Then, cells were introduced to the main channel and trapped at lateral trapping sites with the trapping protocol: 1) trapping vacuum of 7 mmHg for t=0 to 85 seconds, 2) main channel pressure of 0.2 psi for t=0-2 seconds, followed by 15 repeated square pulses of 0-0.2 psi with baseline duration of 4.2 seconds and pulse duration of 0.8 seconds, followed by 0.2 psi for 8 seconds. Whole cell access is achieved by rupturing the patch of the membrane over the hole using the break protocol. A different protocol is used for CHO or HEK293 cells. Breaking protocol for HEK293 cells: 1) breaking vacuum of seven mmHg for t=0-5 seconds, followed by a square pulse of 18 mmHg with a pulse duration of 15 seconds, and followed by 6 mmHg for five seconds, and 2) main channel pressure at 0.15 psi for t=0-25 seconds. Breaking protocol for CHO cells: 1) breaking vacuum of seven mmHg for t=0-10 seconds, followed by a square pulse of 25 mmHg with a pulse duration of five seconds, followed by 6 mmHg for 6 seconds, and a second pulse of 25 mmHg with a pulse duration of five seconds, followed by 6 mmHg for 80 seconds, and 2) main channel pressure at 0.15 psi for t=0-120 seconds. After whole cell configuration, the vacuum pressure is held at 5 mmHg and the main channel pressure at 0.1 psi until the end of the experiment. Cells were first allowed to dialyze for 300 seconds, before compounds were tested. A time course protocol is applied to assess the effect of the compounds on sodium currents elicited by a depolarizing pulse protocol. In order to be able to perform an off-line linear leak subtraction, cells were clamped at −100 mV for 50 milliseconds then hyperpolarized to −120 mV for 100 milliseconds, and repolarized to −80 mV for 30 milliseconds.

[0378] Two data acquisition protocols were used: single pulse and two pulse. Single pulse protocol: cells were clamped at a holding potential of −100 mV, stepped to −120 mV for 100 milliseconds to maximize channel availability and then to −30 mV for 50 milliseconds to open the Nat channels. The sweep interval was five seconds with a holding potential of −80 Mv (FIG. 23A). For the two pulse protocol sodium currents were elicited by a depolarizing step from −80 mV to −30 mV for 1000 millieseconds, followed by 10 ms hyperpolarization at −120 mV and a second depolarizing step at −30 mV for 10 milliseconds. The sweep interval was 9 seconds with a holding potential of −80 mV (FIG. 23B).

[0379] After the stabilizing period, extracellular buffer is continuously perfused for 120 seconds as a negative control, followed by sequential perfusion of different concentrations of ISVDs or selective peptides. The inhibitory responses were recorded at room temperature (21° C.-24° C.) with a minimum of n=2 for each compound.

### IonFlux Data Inclusion Criteria and Data Analysis

[0380] Data points were accepted when:

### (A) Automated Population Patch

[0381] a. Individual membrane resistance quality and stability is greater than 3 MS2 during data acquisition
[0382] b. Current amplitude quality and stability is greater than 2 nA at −30 mV after negative control
[0383] c. Run-up/run-down less than 10% during data acquisition
[0384] d. IC₅₀ value for reference compounds within anticipated range
   (B) Automated Single cell patch
[0385] a. Individual membrane resistance quality and stability is greater than 500 MΩ during data acquisition
[0386] b. Current amplitude quality and stability is greater than 200 pA at −30 mV after negative control
[0387] c. Run-up/run-down less than 10% during data acquisition
[0388] d. IC50 value for reference compounds within anticipated range

[0389] Currents were measured using IonFlux software (Fluxion Biosciences) and monitored continuously during the exposure to the compounds. Measured currents were normalized by the mean I sustained corrected amplitude prior to compound addition. Current inhibition is estimated by the residual response after 120 seconds of each compound application. Data analysis was performed with IonFlux software (Fluxion Biosciences), Microsoft Excel (Microsoft) and Prism 6 (GraphPad Software).

### Electrophysiology Experiments

[0390] A series of experiments was performed, using the two pulse protocol shown in FIG. 23B and a single concentration (1 μM) of F0103265B04, F0103265A11, F0103275B05, F0103362B08, F0103387G04, F0103387G05, F0103262CO2, and F0103262B06 applied for 5 minutes to CHO Flpin huNav1.7α+Navβ1-βNav2-Navβ3 cells, HEK293 huNav1.7α+Navβ1 cells, HEK293 huNav1.7α cells and HEK FlpIn huNav1.7α+Navβ1-Navβ2-Navβ3 cells (see FIGS. 25A-25E). In another experiment, a concentration range (1 μM to 1 nM) of F0103265B04 and F0103362B08 was applied to HEK Flpin huNav1.7α+Navβ1-Navβ2-Navβ3 cells, using the same protocol (see FIG. 24). From these experiments it could be concluded that F0103265B04, F0103265A11, F0103275B05, F0103362B08, F0103387G04 and F0103387G05 but not F0103262CO2 or F0103262B06, functionally inhibit huNav1.7α currents in a dose-dependent manner.

[0391] After the application of F0103265B04 to the cells was stopped and the compound was allowed to wash out by application of buffer, the cells were continued to be monitored on the patch clamp. The inhibitory effect of F0103265B04 did not wash out in the time frame (11 minutes) of the experiment (see FIG. 26).

[0392] A time course experiment with F0103265B04 using the single pulse protocol (see FIG. 25A) revealed that it takes greater than two minutes at 1 μM and greater than eight minutes for F0103265B04 at 10 nM and 100 nM to fully block of the huNav1.7α currents (see FIG. 27).

### Example 8

[0393] Sequence optimization is a process in which parental ISVD sequences are mutated to yield ISVD sequences that are more identical to human and/or llama/alpaca IGHV3-IGHJ germline consensus sequences. Specific amino acids, with the exception of the so-called hallmark residues, in the FRs that differ between the ISVD and the human IGHV3-IGHJ germline consensus are altered to the human counterpart in such a way that the protein structure, activity and stability are kept intact. In addition, the amino acids present in the CDRs for which there is experimental evidence that they are sensitive to post-translational modifications (PTMs) are altered in such a way that the PTM site is inactivated while the protein structure, activity and stability are kept intact. Furthermore, in order to reduce the binding of pre-existing antibodies to the ISVDs, certain FR residues are altered.

[0394] Amino acid residue differences in the CDR regions are not taken into account for sequence optimization. All amino acid differences in the FRs between the ISVD and the human VH341-1 consensus counterparts are identified. Typically, these amino acid residues (numbered according to Kabat) fall into three classes:

1. Hallmarks: These residues are known to be critical for the stability/activity/affinity of the ISVD (based on literature). Therefore, these positions are usually not included in the process. Only when a hallmark is deviating from its llama germline, it is taken into account to be mutated back to the llama/alpaca germline sequence to evaluate potential improvements in stability/activity/affinity. When taken into account this mutation is investigated on an individual basis.
2. Standard: Sequence optimization of these positions is not expected to dramatically change the stability/activity/affinity of the ISVD (based on previous sequence optimization efforts) and they are therefore altered all at once, yielding a basic variant.
3. Unique: It is not known if sequence optimization of these positions affects the stability/activity/affinity of the ISVD and therefore they are investigated on an individual basis on top of the basic variant. These positions typically differ from ISVD to ISVD.

[0395] A potential PTM site will only be mutated when there is evidence that the particular site is sensitive to modification under accelerated stress conditions. If a particular amino acid position is insensitive, the parental sequence will be left unchanged in the final construct. Assessment of chemical stability by means of accelerated stress studies is performed by CMC. The N-terminal Glu residue of the first block of an ISVD construct will always be mutated to an Asp (E1D) because experimental evidence has shown that the majority of ISVDs is significantly sensitive to pyroglutamate formation and that the E1D mutation has no effect on stability/activity/affinity of the ISVD. The E1 residues of all other building blocks in the construct are not mutated.

[0396] In order to reduce the binding of pre-existing antibodies to the ISVDs, L11V and V89L substitutions are introduced to the FRs and an Ala residue is added to the very C-terminus of the ISVD construct. Exceptionally, the T110K mutation may be introduced as well. The “humanness” of a sequence optimized ISVD may be defined as:

Percent amino acid identity in the FRs of the ISVD vs the human VH3-JH consensus sequence
wherein the CDRs may be defined by Kabat, IMGT, AbM, Chothia, or the like. In particular embodiments, the calculation is performed in which the CDRs are defined by at least two methods.

### Sequence Optimization of F0103275B05/F0103387G04

[0397] Several PTM substitution libraries were generated based on the accelerated stress data summarized in Table 24 and screened as crude periplasmic extracts in binding FACS on human and rhesus Nav1.7α. FIG. 28 shows a sequence analysis of F0103275B05/387G04 aligned against the human VH3-J3 consensus sequence and the llama VHH2 consensus sequence.

TABLE 24
Results accelerated stress experiments performed on F0103275B05/387G04 variants

| | | | Stress | Modification |
|---|---|---|---|---|
| ID # | Description | Site | condition | observed |
| F010300659 | F0103275B05(S27P, I28V, | NA | 1 week @, 45° | 0.2% increase |
| | S50Y, N53P, G55W, S56D, | | C., ±1 mg/mL | of pre-peak |
| | T57W, N93R, A94W) + | | in D-PBS | (SE-HPLC) |
| | FLAG3-HIS6 | | | |
| F010301452 | F0103275B05(S27P, I28V, | NA | 1 week @ 45° | 0.1% increase |
| | S50Y, N53P, G55W, S56D, | | C., ±1 mg/mL | of pre-peak |
| | T57W, N93R, A94W) | | in D-PBS | (SE-HPLC) |
| F010301457 | F0103275B05(S27P, I28V, | N32 | 4 weeks @ −20, | Not sensitive |
| | S50Y, N53P, G55W, S56D, | | 25 and 40° C. | |
| | T57W, N93R, A94W) + HIS6 | | | |
| F010301457 | F0103275B05(S27P, I28V, | N73 | 4 weeks @, −20, | 57% |
| | S50Y, N53P, G55W, S56D, | | 25 and 40° C. | |
| | T57W, N93R, A94W) + HIS6 | | | |
| F010301894 | F0103387G04(L11V, A12V, | D72 | 4 weeks @ −20, | 1.8%-12.3% |
| | K33R, R39Q, S50Y, S56D, | | 25 and 40° C. | |
| | T60A, R76N, W78V, S79Y, | | | |
| | T83R, V89L, N93R) + HIS6 | | | |
| F010301894 | F0103387G04(L11V, A12V, | N100c | 4 weeks @ −20, | 1.4-8.9% |
| | K33R, R39Q, S50Y, S56D, | | 25 and 40° C. | |
| | T60A, R76N, W78V, S79Y, | | | |
| | T83R, V89L, N93R) + HIS6 | | | |
| F010301895 | F0103387G04 + HIS6 | D72 | 4 weeks @ −20, | 0.1%-1.7% |
| | | | 25 and 40° C. | |
| F010301895 | F0103387G04 + HIS6 | N100c | 4 weeks @ −20, | 0.7-2.7% |
| | | | 25 and 40° C. | |
| F010301950 | F0103387G04(L11V, A12V, | M34 | 10 mM H₂O₂ | 5% |
| | K33R, R39Q, S50Y, S56D, | | for 3 h @ RT | |
| | T60A, W78V, S79Y, T83R, | | | |
| | V89L, N93R) + HIS6 | | | |
| F010301950 | F0103387G04(L11V, A12V, | D72 | 4 weeks @ −20, | 3-15% |
| | K33R, R39Q, S50Y, S56D, | | 25 and 40° C. | |
| | T60A, W78V, S79Y, T83R, | | | |
| | V89L, N93R) + HIS6 | | | |
| F010301950 | F0103387G04(L11V, A12V, | N100c | 4 weeks @ −20, | 1.2-8.1% |
| | K33R, R39Q, S50Y, S56D, | | 25 and 40° C. | |
| | T60A, W78V, S79Y, T83R, | | | |
| | V89L, N93R) + HIS6 | | | |
| F010301950 | F0103387G04(L11V, A12V, | D99 | 4 weeks @ −20, | 0.5-4.3% |
| | K33R, R39Q, S50Y, S56D, | | 25 and 40° C. | |
| | T60A, W78V, S79Y, T83R, | | | |
| | V89L, N93R) + HIS6 | | | |
| F010302383 | F0103387G04(L11V, A12V, | NA | 1 week @ 45° | 0.2% increase |
| | K33R, R39Q, S50Y, S56D, | | C., ±1 mg/mL | of pre-peak |
| | T60A, D72G, W78V, S79Y, | | in D-PBS | (SE- HPLC) |
| | T83R, V89L, N93R, D99S, | | | |
| | N100cG) + FLAG3-HIS6 | | | |

NA, not applicable

### Screening of F0103275B05/387G04 PTM Substitution Libraries

[0398] Several PTM substitution libraries were generated based on the accelerated stress data summarized in Table 24 and screened as crude periplasmic extracts in binding FACS on human and rhesus Nav1.7α.
[0399] N73G substitution resulted in a comparable or slightly improved binding profile compared to the parental reference F0103275B05 (Table 25) and was retained as this was also the naturally occurring residue on this position in F0103387G04 (FIG. 28).
[0400] Both D72G and D72Q substitutions resulted in a comparable or slightly improved binding profile compared to the parental reference (Table 27) and were further evaluated, as well G73A and G73R substitutions.
[0401] D99S, D99R and D99N substitutions resulted in a comparable or slightly improved binding profile compared to the parental reference (Table 26) and were further evaluated, as well as S100R and S100V substitutions; S99 is the naturally occurring residue on this position in F0103275B05 (FIG. 28).
[0402] N100cI and N100cG (Kabat position 100c) substitutions resulted in a comparable or slightly improved binding profile compared to the parental reference (Table 27) and were further evaluated; I100c is the naturally occurring residue on this position in F0103275B05 (FIG. 28)

TABLE 25
Summary screening N73X & A74X substitution libraries

| | CHO Flp-In | | CHO Flp-In | |
|---|---|---|---|---|
| | huNav1.7α + β1-β2-β3 | | rhNav1.7α + β1-β2-β3 | |
| | (SEQ ID NO: 3) | | (SEQ ID NO: 4) | |
| | Mean | SD | Mean | SD |
| Substitution | MFI | MFI | MFI | MFI |
| A74C | 1371 | 178 | 1380 | 148 |
| A74D | 8876 | 623 | 10933 | 506 |
| A74E | 6156 | 485 | 6767 | 677 |
| A74F | 11022 | 799 | 16436 | 605 |
| A74G | 12165 | 1360 | 18665 | 1369 |
| A74H | 12477 | 2828 | 18686 | 4367 |
| A74I | 4945 | 956 | 7560 | 1518 |
| A74K | 15407 | 1520 | 18490 | 1754 |
| A74L | 7173 | 1605 | 10190 | 1736 |
| A74N | 18129 | 463 | 26491 | 518 |
| A74P | 8928 | 2193 | 14486 | 3731 |
| A74Q | 9585 | 912 | 14644 | 1030 |
| A74R | 11403 | 43 | 16344 | 1503 |
| A74S | 10010 | 1672 | 15420 | 3795 |
| A74T | 9496 | 70 | 13521 | 666 |
| A74V | 6136 | 3294 | 9381 | 4939 |
| A74W | 9065 | 680 | 14913 | 922 |
| A74Y | 14759 | 324 | 21008 | 808 |
| Blanc | 515 | 37 | 482 | 35 |
| Parental reference | 10260 | 2842 | 15695 | 4311 |
| Negative control | 516 | 47 | 560 | 149 |
| N73A | 9387 | 2705 | 14029 | 3929 |
| N73C | 1396 | 8 | 1910 | 66 |
| N73E | 6536 | 478 | 9752 | 768 |
| N73F | 6341 | 714 | 9340 | 1556 |
| N73G | 18297 | 4375 | 27008 | 4900 |
| N73H | 10773 | 105 | 16937 | 830 |
| N73I | 4274 | 1138 | 6184 | 1751 |
| N73K | 13248 | 1558 | 17919 | 1854 |
| N73L | 4640 | 306 | 6839 | 199 |
| N73M | 5088 | 7 | 7638 | 112 |
| N73P | 4910 | 345 | 6851 | 610 |
| N73Q | 6614 | 1334 | 9716 | 2509 |
| N73R | 11583 | 1642 | 17083 | 2197 |
| N73S | 12569 | 2453 | 19307 | 3068 |
| N73T | 8839 | 279 | 14387 | 99 |
| N73V | 4827 | 185 | 7467 | 91 |
| N73W | 5829 | 882 | 8444 | 1061 |
| N73Y | 5732 | 1146 | 8745 | 1594 |

TABLE 26
Summary screening D99X & S100X substitution libraries

| | CHO Flp-In | | CHO Flp-In | |
|---|---|---|---|---|
| | huNav1.7α + β1-β2-β3 | | rhNav1.7α + β1-β2-β3 | |
| | (SEQ ID NO: 3) | | (SEQ ID NO: 4) | |
| | Mean | SD | Mean | SD |
| Substitution | MFI | MFI | MFI | MFI |
| D99A | 14187 | 4136 | 9871 | 2193 |
| D99C | 4625 | 803 | 1637 | 418 |
| D99E | 10633 | 2657 | 6153 | 1878 |
| D99F | 23749 | 3820 | 1834 | 255 |
| D99G | 23305 | 4036 | 10611 | 1456 |
| D99H | 23969 | 8888 | 11169 | 3971 |
| D99I | 4646 | 726 | 551 | 9 |
| D99K | 46514 | 619 | 1036 | 31 |
| D99L | 12797 | 251 | 742 | 103 |
| D99M | 15591 | 1834 | 1136 | 98 |
| D99N | 41774 | 971 | 45539 | 49 |
| D99P | 568 | 6 | 518 | 10 |
| D99R | 45426 | 7088 | 9917 | 2228 |
| D99S | 27582 | 442 | 32383 | 2312 |
| D99V | 12103 | 3467 | 7536 | 1541 |
| D99W | 23646 | 5065 | 8717 | 2202 |
| D99Y | 36537 | 6107 | 11155 | 2438 |
| Parental reference | 21107 | 6057 | 24705 | 5475 |
| S100A | 17866 | 3265 | 18065 | 3864 |
| S100C | 10920 | 2106 | 10646 | 3547 |
| S100D | 3674 | 572 | 2003 | 206 |
| S100E | 9252 | 711 | 6475 | 1144 |
| S100F | 30229 | 410 | 27675 | 1566 |
| S100G | 22114 | 5108 | 22287 | 6403 |
| S100K | 48169 | 1478 | 3966 | 153 |
| S100L | 18824 | 2146 | 21105 | 437 |
| S100M | 26478 | 1935 | 30669 | 2530 |
| S100Q | 33974 | 2862 | 29579 | 1025 |
| S100R | 46564 | 11444 | 12496 | 2135 |
| S100T | 23257 | 7442 | 23861 | 5720 |
| S100V | 29079 | 3063 | 30108 | 330 |
| S100W | 16328 | 1359 | 11736 | 1568 |
| S100Y | 29104 | 1100 | 18385 | 1265 |

TABLE 27
Summary screening D72X, N100cX
& T100dX substitution libraries

| | CHO Flp-In | | CHO Flp-In | |
|---|---|---|---|---|
| | huNav1.7α + β1-β2-β3 | | rhNav1.7α + β1-β2-β3 | |
| | (SEQ ID NO: 3) | | (SEQ ID NO: 4) | |
| | Mean | SD | Mean | SD |
| Substitution | MFI | MFI | MFI | MFI |
| Parental reference | 20313 | 8867 | 21158 | 8172 |
| Blanc | 516 | 21 | 462 | 19 |
| D72A | 32097 | 33 | 32753 | 1387 |
| D72C | 17787 | 10134 | 18066 | 8851 |
| D72E | 30260 | 14879 | 29532 | 13937 |
| D72F | 44931 | 24269 | 41549 | 17306 |
| D72G | 45410 | 7433 | 40171 | 4018 |
| D72I | 49815 | 15573 | 45508 | 12208 |
| D72K | 38860 | 3520 | 37695 | 3863 |
| D72L | 25424 | 11275 | 25338 | 9201 |
| D72M | 31103 | 13565 | 30170 | 11470 |
| D72P | 33230 | 11366 | 33325 | 8976 |
| D72Q | 47752 | 4735 | 43479 | 6177 |
| D72T | 38112 | 13534 | 35858 | 10233 |
| D72V | 31046 | 1671 | 30086 | 2155 |
| D72W | 44290 | 19513 | 38836 | 16236 |
| D72Y | 48641 | 19181 | 44618 | 14962 |
| N100cA | 18336 | 4353 | 16832 | 3604 |
| N100cD | 33726 | 3075 | 25954 | 3742 |
| N100cE | 21563 | 4451 | 15559 | 4511 |
| N100cF | 49642 | 6758 | 45764 | 6911 |
| N100cG | 54396 | 3864 | 46627 | 6061 |
| N100cI | 48332 | 2499 | 45805 | 2003 |
| N100cK | 46602 | 9571 | 50105 | 7223 |
| N100cL | 22679 | 3863 | 21605 | 3558 |
| N100cM | 36747 | 5344 | 35809 | 3787 |
| N100cP | 42552 | 379 | 35496 | 130 |
| N100cQ | 31049 | 966 | 28498 | 371 |
| N100cR | 39701 | 8211 | 46177 | 4971 |
| N100cS | 45457 | 167 | 43443 | 390 |
| N100cT | 38337 | 13505 | 35636 | 12150 |
| N100cV | 23442 | 3541 | 23509 | 3556 |
| N100cW | 38400 | 11435 | 37044 | 6489 |
| N100cY | 26791 | 303 | 27111 | 348 |
| T100dA | 8815 | 4912 | 5014 | 2542 |
| T100dC | 7049 | 1662 | 8567 | 2118 |
| T100dD | 3647 | 1652 | 6727 | 3269 |
| T100dE | 541 | 12 | 1562 | 384 |
| T100dF | 628 | 133 | 8704 | 7843 |
| T100dH | 19494 | 9467 | 15424 | 7021 |
| T100dI | 884 | 161 | 24959 | 17119 |
| T100dK | 519 | 39 | 462 | 31 |
| T100dL | 807 | 34 | 19047 | 1558 |
| T100dM | 7096 | 10045 | 35198 | 14877 |
| T100dP | 2934 | 840 | 20174 | 6801 |
| T100dQ | 700 | 75 | 7062 | 3009 |
| T100dR | 529 | 6 | 464 | 10 |
| T100dS | 20718 | 6040 | 23029 | 5954 |
| T100dV | 5499 | 611 | 13598 | 1603 |
| T100dW | 638 | 4 | 5362 | 810 |
| T100dY | 937 | 166 | 26415 | 9982 |

### Characterization of F0103275B05/387G04 Variants

[0403] Sequence optimization was initiated on F0103275B05 (Table 29) but later on continued on the related and improved F0103387G04 (Table 30). Likewise, affinity maturation substitutions identified for F0103275B05 were successfully transferred to F0103387G04. The variants were compared in binding FACS on human and rhesus Nav1.7α, in aSEC for possible multimerization, in OD340 for insoluble aggregate formation and in the thermal shift assay for Tm.

[0404] The thermal shift assay (TSA) was performed in a 96-well plate on the LightCycler 48011 machine (Roche). Per row, one sample was analyzed according to the following pH range: 3.5/4/4.5/5/5.5/6/6.5/7/7.5/8/8.5/9. Per well, 5 μl of sample (0.8 mg/ml in PBS) was added to 5 μL of Sypro Orange (40× in MilliQ water; Invitrogen cat. No. 56551) and 10 μL of buffer (100 mM phosphate, 100 mM borate, 100 mM citrate and 115 mM NaCl with a pH ranging 3.5 to 9). The applied temperature gradient (37 to 99° C. at a rate of 0.03° C./s) induces unfolding of the ISVDs whereby their hydrophobic patches become exposed. Sypro Orange binds to those hydrophobic patches, resulting in an increase in fluorescence intensity (Ex/Em=465/580 nm). The inflection point of the first derivative of the fluorescence intensity curve at pH 7 serves as a measure of the melting temperature (Tm).

[0405] Table 28 summarizes the effects of the explored substitutions.

TABLE 28
Overview of F0103387G04 substitutions

| | huNav1.7α | rhNav1.7α | | | | |
|---|---|---|---|---|---|---|
| | EC50 | EC50 | Tm | aSEC | | |
| | fold change | fold change | difference | behavior | OD340 | |
| | compared to | compared to | compared to | compared to | compared to | Retain |
| Substitution | reference | reference | reference | reference | reference | substitution |
| L11V | = | = | −2 | = | = | Y |
| (L11V, T83R, V89L) | | | | | | |
| A12V | ND | ND | ND | ND | ND | Y |
| K33R | = | + | −4 | = | = | Y |
| (K33R, S50Y, S56D, | | | | | | |
| N93R) | | | | | | |
| R39Q | − | − | +3 | = | = | Y |
| S50Y | = | + | −4 | = | = | Y |
| (K33R, S50Y, S56D, | | | | | | |
| N93R) | | | | | | |
| S56D | = | + | −4 | = | = | Y |
| (K33R, S50Y, S56D, | | | | | | |
| N93R) | | | | | | |
| T60A | = | = | +3 | = | = | Y |
| D72G | + | + | ND | ND | ND | Y |
| D72Q | + | + | ND | ND | ND | N |
| G73N | −2 | −2 | −2 | = | = | N |
| G73A | − | − | −3 | = | = | N |
| G73R | + | + | −4 | = | = | N |
| R76N | −2 | −2 | −2 | = | = | N |
| R76_V78insT | −3 | −6 | +5 in | = | = | N |
| | | | 275B05 | | | |
| | | | −5 in | | | |
| | | | 387G04 | | | |
| W78V | = | = | −6 | = | = | Y |
| S79Y | = | = | = | = | = | Y |
| T83R | = | = | −2 | = | | Y |
| (L11V, T83R, V89L) | | | | | | |
| V89L | = | = | −2 | = | = | Y |
| (L11V, T83R, V89L) | | | | | | |
| N93R | = | ++ | −4 | = | = | Y |
| (K33R, S50Y, S56D, | | | | | | |
| N93R) | | | | | | |
| D99S | +2 | +2 | −1 | = | = | Y |
| D99R | + | + | proteolytic degradation | | | N |
| D99N | +2 | +2 | −2 | = | = | N |
| S100R | + | + | proteolytic degradation | | | N |
| S100V | −2 | −2 | +1 | = | = | N |
| N100cG | + | + | = | = | = | Y |
| N100cI | − | − | −1 | = | = | N |

ND, not determined

TABLE 29
Characterization of F0103275B05 variants
Part 1

| | | | | | | | | | | | CHO | |
|---|---|---|---|---|---|---|---|---|---|---|---|---|
| | | | | | | | | | | | FlpIn | CHO |
| | | | | | | | | | | | huNav1.7α- | FlpIn |
| | | | | | | | | | | | β1-β2- | rhNav1.7α- |
| | | | | | | | | | | | (SEQ ID | β1-β2-β3 |
| | | | | | | | | | | | NO: 3) | (SEQ ID |
| | | | | | | | | | | | β3 | NO: 4) |
| ID # | L11 | S33R | R39 | S50Y | S56D | R76 | 77 | T83 | V89 | N93R | EC50 [M] | EC50 [M] |
| F010301461 | . | R | . | Y | D | . | — | . | . | R | ND | ND |
| F010301635 | V | . | Q | . | . | . | — | R | L | . | ND | ND |
| F010301636 | V | . | . | . | . | N | — | R | L | . | ND | ND |
| F010301637 | V | . | . | . | . | . | — | R | L | . | 5.6E−08 | ND |
| F010301638 | V | . | Q | . | . | N | — | R | L | . | ND | ND |
| F010301639 | V | . | Q | . | . | . | T | R | L | . | ND | ND |
| F010301640 | V | . | . | . | . | . | T | R | L | . | ND | ND |
| F010301641 | V | . | . | . | . | N | T | R | L | . | ND | ND |
| F010301642 | V | . | Q | . | . | N | T | R | L | . | ND | ND |
| F010301652 | V | R | . | Y | D | N | — | R | L | R | 6.1E−08 | 2.4E−08 |
| F010301653 | V | R | . | Y | D | . | — | R | L | R | 3.6E−08 | 1.6E−08 |
| F010301654 | V | R | Q | Y | D | . | — | R | L | R | 3.2E−08 | 1.8E−08 |
| F010301655 | V | R | Q | Y | D | N | — | R | L | R | 4.6E−08 | 2.6E−08 |
| F0103275B05 | . | . | . | . | . | . | — | . | . | . | 6.6E−08 | — |

Part 2

| | | | HEKa/b 1 | | |
|---|---|---|---|---|---|
| | HEK FlpIn | HEK | (SEQ ID | | |
| | Nav157ch14- | FlpIn | NO: 40) | HEKa | |
| | β1-β2-β3 | Nav157ch14 | huNav1.7α | huNav1.7α | |
| | (SEQ ID | (SEQ ID | (SEQ ID | (SEQ ID | |
| | NO: 20) | NO: 20) | NO: 1) | NO: 1) | Tm |
| ID # | EC50 [M] | EC50 [M] | EC50 [M] | EC50 [M] | [° C.] |
| F010301461 | ND | ND | ND | ND | 64 |
| F010301635 | 3.5E−08 | 1.6E−08 | 3.1E−08 | 1.9E−08 | 68 |
| F010301636 | 4.5E−08 | 1.4E−08 | 3.0E−08 | 1.7E−08 | 64 |
| F010301637 | 2.9E−08 | 1.1E−08 | 3.0E−08 | 1.3E−08 | 66 |
| F010301638 | 5.0E−08 | 1.8E−08 | 3.2E−08 | 2.3E−08 | 67 |
| F010301639 | — | — | 9.4E−08 | — | 72 |
| F010301640 | — | — | 6.5E−08 | — | 69 |
| F010301641 | 3.5E−07 | 3.1E−07 | 2.3E−07 | 3.8E−07 | 70 |
| F010301642 | — | — | — | — | 73 |
| F010301652 | ND | ND | 3.8E−08 | 2.4E−08 | 60 |
| F010301653 | ND | ND | 2.9E−08 | 1.5E−08 | 62 |
| F010301654 | ND | ND | 2.5E−08 | 1.8E−08 | 65 |
| F010301655 | ND | ND | 2.8E−08 | 1.9E−08 | 63 |
| F0103275B05 | 3.3E−08 | 1.2E−08 | 3.9E−08 | 1.4E−08 | 68 |

ND, not determined

TABLE 30
Characterization of F0103387G04 variants

Part 1

| ID # | L11 | A12 | K33 | R39 | S50 | S56 | T60 | D72 | G73 | R76 |
|---|---|---|---|---|---|---|---|---|---|---|
| F010301656 | . | . | R | . | Y | D | . | . | . | . |
| F010301840 | V | V | R | Q | Y | D | . | . | . | . |
| F010301841 | V | V | R | Q | Y | D | . | . | . | . |
| F010301842 | V | V | R | Q | Y | D | A | . | . | . |
| F010301843 | V | V | R | Q | Y | D | . | . | N | . |
| F010301844 | V | V | R | Q | Y | D | . | . | . | N |
| F010301845 | V | V | R | Q | Y | D | . | . | . | . |
| F010301846 | V | V | R | Q | Y | D | . | . | . | . |
| F010301847 | V | V | R | Q | Y | D | A | . | N | N |
| F010301848 | V | V | R | Q | Y | D | A | . | N | . |
| F010301865 | V | V | R | Q | Y | D | A | . | . | . |
| F010301866 | V | V | R | Q | Y | D | A | . | . | N |
| F010302310 | V | V | R | Q | Y | D | A | | A | . |
| F010302311 | V | V | R | Q | Y | D | A | | R | . |
| F010302312 | V | V | R | Q | Y | D | A | . | . | . |
| F010302313 | V | V | R | Q | Y | D | A | . | A | . |
| F010302314 | V | V | R | Q | Y | D | A | . | R | . |
| F010302315 | V | V | R | Q | Y | D | A | | . | . |
| F010302316 | V | V | R | Q | Y | D | A | | A | . |
| F010302317 | V | V | R | Q | Y | D | A | | R | . |
| F010302318 | V | V | R | Q | Y | D | A | | . | . |
| F010302319 | V | V | R | Q | Y | D | A | | A | . |
| F010302320 | V | V | R | Q | Y | D | A | . | A | . |
| F010302321 | V | V | R | Q | Y | D | A | | R | . |
| F010302322 | V | V | R | Q | Y | D | A | | . | . |
| F010302323 | V | V | R | Q | Y | D | A | | A | . |
| F010302324 | V | V | R | Q | Y | D | A | | R | . |
| F010302325 | V | V | R | Q | Y | D | A | . | R | . |
| F010302326 | V | V | R | Q | Y | D | A | | . | . |
| F010302327 | V | V | R | Q | Y | D | A | | A | . |
| F010302328 | V | V | R | Q | Y | D | A | | R | . |
| F010302329 | V | V | R | Q | Y | D | A | | . | . |
| F010302330 | V | V | R | Q | Y | D | A | | A | . |
| F010302331 | V | V | R | Q | Y | D | A | | R | . |
| F010302332 | V | V | R | Q | Y | D | A | | . | . |
| F010302370 | V | V | R | Q | Y | D | A | . | R | . |
| F010302371 | V | V | R | Q | Y | D | A | . | R | . |
| F010302372 | V | V | R | Q | Y | D | A | . | R | . |
| F010302383 | V | V | R | Q | Y | D | A | G | . | . |
| F010302384 | V | V | R | Q | Y | D | A | G | . | . |
| F010302385 | V | V | R | Q | Y | D | A | Q | . | . |
| F010302386 | V | V | R | Q | Y | D | A | Q | . | . |
| F0103387G04 | . | . | . | . | . | . | . | . | . | . |

Part 1

| ID # | 77 | W78 | S79 | T83 | V89 | N93 | D99 | S100 | N100c |
|---|---|---|---|---|---|---|---|---|---|
| F010301656 | — | . | . | . | . | R | . | . | . |
| F010301840 | T | . | . | R | L | R | . | . | . |
| F010301841 | — | . | . | R | L | R | . | . | . |
| F010301842 | — | . | . | R | L | R | . | . | . |
| F010301843 | — | . | . | R | L | R | . | . | . |
| F010301844 | — | . | . | R | L | R | . | . | . |
| F010301845 | — | V | . | R | L | R | . | . | . |
| F010301846 | — | . | Y | R | L | R | . | . | . |
| F010301847 | — | V | Y | R | L | R | . | . | . |
| F010301848 | — | V | Y | R | L | R | . | . | . |
| F010301865 | — | V | Y | R | L | R | . | . | . |
| F010301866 | — | V | Y | R | L | R | . | . | . |
| F010302310 | — | V | Y | R | L | R | R | R | . |
| F010302311 | — | V | Y | R | L | R | R | R | . |
| F010302312 | — | V | Y | R | L | R | . | . | I |
| F010302313 | — | V | Y | R | L | R | . | . | I |
| F010302314 | — | V | Y | R | L | R | . | . | I |
| F010302315 | — | V | Y | R | L | R | R | . | I |
| F010302316 | — | V | Y | R | L | R | R | . | I |
| F010302317 | — | V | Y | R | L | R | R | . | I |
| F010302318 | — | V | Y | R | L | R | . | R | I |
| F010302319 | — | V | Y | R | L | R | . | R | I |
| F010302320 | — | V | Y | R | L | R | . | . | . |
| F010302321 | — | V | Y | R | L | R | . | R | I |
| F010302322 | — | V | Y | R | L | R | R | R | I |
| F010302323 | — | V | Y | R | L | R | R | R | I |
| F010302324 | — | V | Y | R | L | R | R | R | I |
| F010302325 | — | V | Y | R | L | R | . | . | . |
| F010302326 | — | V | Y | R | L | R | R | . | . |
| F010302327 | — | V | Y | R | L | R | R | . | . |
| F010302328 | — | V | Y | R | L | R | R | . | . |
| F010302329 | — | V | Y | R | L | R | . | R | . |
| F010302330 | — | V | Y | R | L | R | . | R | . |
| F010302331 | — | V | Y | R | L | R | . | R | . |
| F010302332 | — | V | Y | R | L | R | R | R | . |
| F010302370 | — | V | Y | R | L | R | S | . | I |
| F010302371 | — | V | Y | R | L | R | N | V | I |
| F010302372 | — | V | Y | R | L | R | . | V | I |
| F010302383 | — | V | Y | R | L | R | S | . | G |
| F010302384 | — | V | Y | R | L | R | S | . | I |
| F010302385 | — | V | Y | R | L | R | S | . | G |
| F010302386 | — | V | Y | R | L | R | S | . | I |
| F0103387G04 | — | . | . | . | . | . | . | . | . |

Part 2

| | CHO | | | | |
|---|---|---|---|---|---|
| | FlpIn | CHO | CHO | CHO | |
| | huNav1.7α + | FlpIn | FlpIn | FlpIn | |
| | β1-β2- | huNav1.7α + | rhNav1.7α- | rhNav1.7α- | |
| | β3 (SEQ | β1-β2- | β1 + β2- | β1 + β2- | |
| | ID NO: | β3(SEQ | β3 (SEQ | β3 (SEQ | |
| | 3) EC50 | ID NO: 3) | ID NO: 4) | ID NO: | |
| ID # | [M] | Bmax | EC50 [M] | 4) Bmax | Tm [° C.] |
| F010301656 | 1.7E−08 | 100% | 8.0E−09 | 100% | 72 |
| F010301840 | 4.7E−08 | 100% | 4.8E−08 | 50% | 70 |
| F010301841 | 1.4E−08 | 100% | 7.6E−09 | 100% | 75 |
| F010301842 | 1.5E−08 | 100% | 7.9E−09 | 100% | 78 |
| F010301843 | 1.8E−08 | 100% | 9.3E−09 | 100% | 74 |
| F010301844 | 2.3E−08 | 100% | 1.1E−08 | 100% | 73 |
| F010301845 | 1.7E−08 | 100% | 8.0E−09 | 100% | 69 |
| F010301846 | 2.1E−08 | 100% | 1.1E−08 | 100% | 75 |
| F010301847 | 6.7E−08 | 100% | 2.9E−08 | 100% | 70 |
| F010301848 | 4.4E−08 | 100% | 1.9E−08 | 100% | 73 |
| F010301865 | 2.0E−08 | 100% | 1.1E−08 | 100% | 75 |
| F010301866 | 3.8E−08 | 100% | 1.8E−08 | 100% | 73 |
| F010302310 | ND | ND | ND | ND | ND |
| F010302311 | ND | ND | ND | ND | ND |
| F010302312 | 2.4E−08 | 100% | 1.8E−08 | 100% | 74 |
| F010302313 | 3.8E−08 | 100% | 3.4E−08 | 96% | 71 |
| F010302314 | 1.6E−08 | 100% | 1.4E−08 | 98% | 70 |
| F010302315 | 7.2E−09 | 100% | 3.9E−08 | 23% | ND |
| F010302316 | 8.2E−09 | 91% | — | — | ND |
| F010302317 | 6.8E−09 | 91% | 1.9E−08 | 13% | ND |
| F010302318 | 1.1E−08 | 89% | — | — | ND |
| F010302319 | 1.5E−08 | 88% | — | — | ND |
| F010302320 | 3.0E−08 | 99% | 2.1E−08 | 100% | 71 |
| F010302321 | 7.9E−09 | 91% | — | — | ND |
| F010302322 | ND | ND | ND | ND | ND |
| F010302323 | ND | ND | ND | ND | ND |
| F010302324 | 2.9E−08 | 42% | — | — | ND |
| F010302325 | 1.3E−08 | 96% | 8.7E−09 | 99% | 71 |
| F010302326 | 6.2E−09 | 89% | 1.8E−08 | 32% | ND |
| F010302327 | 7.0E−09 | 87% | 9.3E−08 | 7% | ND |
| F010302328 | ND | ND | ND | ND | ND |
| F010302329 | 7.6E−09 | 94% | 1.9E−08 | 44% | ND |
| F010302330 | 1.0E−08 | 93% | 2.0E−07 | 23% | ND |
| F010302331 | 6.0E−09 | 90% | 2.4E−08 | 38% | ND |
| F010302332 | ND | ND | ND | ND | ND |
| F010302370 | 9.0E−09 | 100% | 7.3E−09 | 100% | 69 |
| F010302371 | 9.4E−09 | 100% | 1.0E−08 | 100% | 68 |
| F010302372 | 1.7E−08 | 100% | 2.0E−08 | 100% | 70 |
| F010302383 | 6.8E−09 | 100% | 4.5E−09 | 100% | 73 |
| F010302384 | 6.2E−09 | 100% | 4.3E−09 | 100% | 72 |
| F010302385 | 7.9E−09 | 100% | 5.0E−09 | 100% | 74 |
| F010302386 | 7.3E−09 | 100% | 4.9E−09 | 100% | 72 |
| F0103387G04 | 1.7E−08 | 100% | 8.7E−08 | 10% | 76 |

ND, not determined

### Selection of an F0103387G04 Sequence Optimization Variant

[0406] Variant F010302383 was selected as the final sequence optimization variant of F0103387G04 (see F0103387G04 SO in FIG. 28). It boasts a 2- and 20-fold improved binding on huNav1.7α and rhNav1.7α respectively, as well as comparable aSEC and OD340 nm behavior and a slightly reduced thermal stability (Table 31). In vitro electrophysiology experiments confirmed the low nM potency on huNav1.7α and rhNav1.7α and selectivity over Nav1.4, Nav1.5α and Nav1.6α. All PTM liabilities (Table 24) were successfully substituted. Cell-free fermentation expression titers at CMC of the corresponding monovalent tagless variant F01032396 in P. pastoris were 3.6 g/L.

TABLE 31
Sequence optimization variant of F0103387G04
Part 1

| | CHO | CHO | CHO | | | | | |
|---|---|---|---|---|---|---|---|---|
| | FlpIn | FlpIn | FlpIn | HEK | HEK | | | |
| | huNav1.7α + | rhNav1.7α + | rhNav1.7α + | huNav1.7α + | rhNav1.7α + | HEK | HEK | HEK |
| | β1-β2-β3 | β1-β2-β3 | β1-β2-β3 | β1 | β1-β2-β3 | huNav1.4α | huNav1.5α | huNav1.6α |
| | (SEQ ID | (SEQ ID | (SEQ ID | (SEQ ID | (SEQ ID | (SEQ ID | (SEQ ID | (SEQ ID |
| | NO: 3) | NO: 4) | NO: 4) | NO: 44) | NO: 4) | NO: 1) | NO: 27) | NO: 28) |
| ID # | EC50 [M] | EC50 [M] | Bmax | IC50 [M] | IC50 [M] | IC50 [M] | IC50 [M] | IC50 [M] |
| F0103387G04 | 1.7E−08 | 8.7E−08 | 10% | ND | ND | ND | ND | ND |
| F010302383 | 6.8E−09 | 4.5E−09 | 100% | 2.2E−08 | 3.0E−09 | — | — | — |

—, no activity observed @ 7 μM;
ND, not determined

Part 2

| ID # | Tm [° C.] | Tagg [° C.] | aSEC | OD340 nm | AbM | Kabat |
|---|---|---|---|---|---|---|
| F0103387G04 | 76 | ND | ok | ok | 81% | 78% |
| F010302383 | 73 | 69 | ok | ok | 83% | 79% |

ND, not determined

### Example 9

### Sequence Optimization of F0103387G05

[0407] Several PTM substitution libraries were generated based on the accelerated stress data summarized in Table 32 and screened as crude periplasmic extracts in binding FACS on human Nav1.7α.

TABLE 32
Results accelerated stress experiments performed on F0103387G05 variants

| | | | | Modification |
|---|---|---|---|---|
| ID # | Description | Site | Stress condition | observed |
| F0103387G05 | F0103387G05- | NA | 1 week @ 45° | 0.3% increase |
| | FLAG3-HIS6 | | C., ±1 mg/mL | of pre-peak |
| | | | in D-PBS | (SE-HPLC) |
| F010301456 | F0103387G05-HIS6 | CD | 4 weeks @ −20, | 0.8-6.1% |
| | | R2 | 25 and 40° C. | isomerization |
| F010301456 | F0103387G05-HIS6 | N73 | 4 weeks @ −20, | 1.2-13% |
| | | | 25 and 40° C. | |
| F010301949 | F0103387G05(L11V, | CD | 4 weeks @ −20, | 1-9% |
| | A14P, D23A, H37Y, | R2 | 25 and 40° C. | isomerization |
| | G40A, A41P, D58G, | | | |
| | N82bS, N83R, V89L, | | | |
| | R105Q)-HIS6 | | | |
| F010301949 | F0103387G05(L11V, | N73 | 4 weeks @ −20, | 0.7-9% |
| | A14P, D23A, H37Y, | | 25 and 40° C. | |
| | G40A, A41P, D58G, | | | |
| | N82bS, N83R, | | | |
| | V89L, R105Q)- | | | |
| | HIS6 | | | |
| F010302391 | F0103387G05(L11V, | NA | 1 week @ 45° | 0.2% increase |
| | A14P, D23A, H37Y, | | C., ±1 mg/mL | of pre-peak |
| | G40A, A41P, D53G, | | in D-PBS | (SE-HPLC) |
| | D54G, D58G, N82bS, | | | |
| | N83R, V89L, R105Q)- | | | |
| | FLAG3-HIS6 | | | |

ND, not determined

[0408] N73Q substitution resulted in a better binding profile compared to the parental reference (Table 33) and was further evaluated, as well as N73A and N73Y substitutions.
[0409] Because of the available choices to substitute N73, no mutations for A74 were further evaluated.

TABLE 33
Summary screening of N73X & A74 substitution libraries

CHO Flp-In
huNav1.7α + β1-β2-β3
(SEQ ID NO: 3)

| | Mean | SD |
|---|---|---|
| Substitution | MFI | MFI |
| A74D | 72131 | 8952 |
| A74E | 67339 | 6350 |
| A74I | 76360 | 7842 |
| A74K | 99046 | 1123 |
| A74L | 70981 | 6848 |
| A74N | 80896 | 11713 |
| A74P | 63748 | 2925 |
| A74Q | 75053 | 9885 |
| A74S | 57716 | 7270 |
| A74T | 66295 | 10425 |
| A74W | 40642 | 8566 |
| Blanc | 570 | NA |
| Negative control | 566 | 12 |
| Parental reference | 48046 | 8443 |
| N73A | 84208 | 12907 |
| N73D | 77600 | 8148 |
| N73E | 64666 | 7724 |
| N73F | 60283 | 14931 |
| N73G | 84896 | 8452 |
| N73H | 68524 | 2512 |
| N73I | 81380 | 16558 |
| N73K | 85809 | 21302 |
| N73L | 70525 | 14051 |
| N73M | 87197 | 8041 |
| N73P | 58705 | 45951 |
| N73Q | 79497 | 12894 |
| N73R | 66654 | 8484 |
| N73S | 85111 | 2933 |
| N73T | 71638 | 13462 |
| N73V | 84743 | 7727 |
| N73Y | 86218 | 8813 |

HEK293 human Nav1.7α
(SEQ ID NO: 1)

| | Mean | SD |
|---|---|---|
| Substitution | MFI | MFI |
| A74D | 33271 | 2071 |
| A74E | 28963 | 2627 |
| A74I | 33074 | 3560 |
| A74K | 38376 | 722 |
| A74L | 27756 | 4959 |
| A74N | 34952 | 2025 |
| A74P | 28080 | 948 |
| A74Q | 31394 | 3986 |
| A74S | 29160 | 2997 |
| A74T | 30375 | 4492 |
| A74W | 20460 | 4869 |
| Blanc | 734 | NA |
| Negative control | 723 | 2 |
| Parental reference | 22340 | 3535 |
| N73A | 35560 | 5590 |
| N73D | 32744 | 2730 |
| N73E | 29576 | 3544 |
| N73F | 27251 | 5503 |
| N73G | 35331 | 3769 |
| N73H | 31210 | 1722 |
| N73I | 36497 | 5563 |
| N73K | 32267 | 6201 |
| N73L | 34819 | 2876 |
| N73M | 38463 | 2348 |
| N73P | 25112 | 18794 |
| N73Q | 33609 | 3748 |
| N73R | 30872 | 4401 |
| N73S | 36285 | 1224 |
| N73T | 32687 | 4647 |
| N73V | 37400 | 1183 |
| N73Y | 36734 | 5290 |

HEK293 human
Nav1.7α + β1
(SEQ ID NO: 44)

| | Mean | SD |
|---|---|---|
| Substitution | MFI | MFI |
| A74D | 79560 | 6225 |
| A74E | 74537 | 1165 |
| A74I | 76639 | 1998 |
| A74K | 84166 | 964 |
| A74L | 75554 | 2070 |
| A74N | 81639 | 5349 |
| A74P | 66190 | 2235 |
| A74Q | 78895 | 5333 |
| A74S | 65093 | 7925 |
| A74T | 72355 | 5048 |
| A74W | 49009 | 11489 |
| Blanc | 789 | NA |
| Negative control | 778 | 6 |
| Parental reference | 59514 | 8475 |
| N73A | 83244 | 10774 |
| N73D | 82260 | 3026 |
| N73E | 76352 | 3918 |
| N73F | 64305 | 10544 |
| N73G | 79190 | 3307 |
| N73H | 70459 | 3060 |
| N73I | 79431 | 7248 |
| N73K | 79446 | 16278 |
| N73L | 75337 | 11011 |
| N73M | 84223 | 4072 |
| N73P | 60089 | 45450 |
| N73Q | 78260 | 5434 |
| N73R | 67882 | 4153 |
| N73S | 79692 | 2217 |
| N73T | 76277 | 8140 |
| N73V | 84341 | 3090 |
| N73Y | 85910 | 1947 |

NA, not applicable

### Characterization of F0103387G05 Variants

[0410] Affinity maturation substitutions that improved the binding of F0103387G05 were transferred to the sequence optimized variants. These variants were compared (Table 35) in binding FACS on human Nav1.7α, in aSEC for possible multimerization, in OD340 for insoluble aggregate formation and in the thermal shift assay for Tm. Table 34 summarizes the effects of the explored substitutions.

TABLE 34
Overview of F0103387G05 substitutions
Part 1

| | huNav1.7α + β1 | huNav1.7α | huNav1.7α |
|---|---|---|---|
| | (SEQ ID NO: 44) | (SEQ ID NO: 1) | (SEQ ID NO: 1) |
| | EC50 | without EC50 | without Bmax |
| | fold change | fold change | fold change |
| | compared to | compared to | compared to |
| Substitution | reference | reference | reference |
| L11V(L11V, A14P, N82bS, | = | = | = |
| N83R, V89L, R105Q) | | | |
| A14P(L11V, A14P, N82bS, | = | = | = |
| N83R, V89L, R105Q) | | | |
| D23A | + | + | = |
| H37Y | = | = | = |
| G40A | = | = | = |
| A41P | = | = | = |
| F47L | = | −2 | − |
| D53G (D53G, D54G) | + | + | = |
| D54G (D53G, D54G) | + | + | = |
| D58G | + | + | = |
| N73A | = | = | = |
| N73Q | = | = | = |
| N73Y | = | = | = |
| N82bS(L11V, A14P, N82bS, | = | = | = |
| N83R, V89L, R105Q) | | | |
| N83R(L11V, A14P, N82bS, | = | = | = |
| N83R, V89L, R105Q) | | | |
| V89L(L11V, A14P, N82bS, | = | = | = |
| N83R, V89L, R105Q) | | | |
| E93N | = | −20 | −4 |
| R105Q(L11V, A14P, N82bS, | = | = | = |
| N83R, V89L, R105Q) | | | |

Part 2

| | Tm | aSEC | | |
|---|---|---|---|---|
| | difference | behavior | OD340 | |
| | compared to | compared to | compared to | Retain |
| Substitution | reference | reference | reference | substitution |
| L11V(L11V, A14P, N82bS, | −2 | = | = | Y |
| N83R, V89L, R105Q) | | | | |
| A14P(L11V, A14P, N82bS, | −2 | = | = | Y |
| N83R, V89L, R105Q) | | | | |
| D23A | +4 | = | = | Y |
| H37Y | = | = | = | Y |
| | ++ at low | | | |
| | pH (FIG. 3) | | | |
| G40A | +1 | = | = | Y |
| A41P | +1 | = | = | Y |
| F47L | −4 | = | = | N |
| D53G (D53G, D54G) | −4 | ND | ND | Y |
| D54G (D53G, D54G) | −4 | ND | ND | Y |
| D58G | −4 | = | = | Y |
| N73A | = | = | = | N |
| N73Q | = | = | = | N |
| N73Y | −1 | = | = | N |
| N82bS(L11V, A14P, N82bS, | −2 | = | = | Y |
| N83R, V89L, R105Q) | | | | |
| N83R(L11V, A14P, N82bS, | −2 | = | = | Y |
| N83R, V89L, R105Q) | | | | |
| V89L(L11V, A14P, N82bS, | −2 | = | = | Y |
| N83R, V89L, R105Q) | | | | |
| E93N | −6 | = | = | N |
| R105Q(L11V, A14P, N82bS, | −2 | = | = | Y |
| N83R, V89L, R105Q) | | | | |

ND, not determined

TABLE 35
Characterization of F010387G05 variants
Part 1

| ID # | L11 | A14 | D23 | H37 | G40 | A41 | F47 | D53 | D54 | D58 | N73 | N82b | N83 | V89 | E93 | R105 |
|---|---|---|---|---|---|---|---|---|---|---|---|---|---|---|---|---|
| F010301556 | . | . | A | . | . | . | . | G | G | G | . | . | . | . | . | . |
| F010301563 | . | . | A | . | . | . | . | . | . | G | . | . | . | . | . | . |
| F010301643 | Q | P | A | . | . | . | . | . | . | . | . | S | R | L | . | Q |
| F010301644 | V | P | . | Y | . | . | . | . | . | . | . | S | R | L | . | Q |
| F010301645 | V | P | . | . | A | . | . | . | . | . | . | S | R | L | . | Q |
| F010301646 | V | P | . | . | . | P | . | . | . | . | . | S | R | L | . | Q |
| F010301647 | V | P | . | . | . | . | L | . | . | . | . | S | R | L | . | Q |
| F010301648 | V | P | . | . | . | . | . | . | . | . | . | S | R | L | N | Q |
| F010301649 | V | P | . | . | . | . | . | . | . | . | . | S | R | L | . | Q |
| F010301849 | V | P | A | . | A | P | . | . | . | G | . | S | R | L | . | Q |
| F010301850 | V | P | A | Y | A | P | . | . | . | G | . | S | R | L | . | Q |
| F010302307 | V | P | A | Y | A | P | . | . | . | G | A | S | R | L | . | Q |
| F010302308 | V | P | A | Y | A | P | . | . | . | G | Y | S | R | L | . | Q |
| F010302309 | V | P | A | Y | A | P | . | . | . | G | Q | S | R | L | . | Q |
| F010302391 | V | P | A | Y | A | P | . | G | G | G | . | S | R | L | . | Q |
| F010302392 | V | P | A | Y | A | P | . | G | G | G | Q | S | R | L | . | Q |
| F0103387G05 | . | . | . | . | . | . | . | . | . | . | . | . | . | . | . | . |

Part 2

| | HEK | | | HEKa/β1 | | | HEK |
|---|---|---|---|---|---|---|---|
| | FlpIn | HEK | | (SEQ ID | | | FlpIn |
| | Nav157ch14- | FlpIn | HEK | NO: 40) | HEKa | | Nav1.7α + |
| | β1-β2- | Nav157ch14 | FlpIn | Nav1.7α | Nav1.7α | HEKa | β1- β2- |
| | β3 (SEQ | (SEQ ID | Nav157ch14 | (SEQ ID | (SEQ ID | Nav1.7α | β3 (SEQ |
| | ID NO: | NO: 20) | (SEQ ID | NO: 1) | NO: 1) | (SEQ ID | ID NO: 3) |
| | 20) EC50 | EC50 | NO: 19) | EC50 | EC50 | NO: 1) | EC50 |
| ID # | [M] | [M] | Bmax | [M] | [M] | Bmax | [M] |
| F010301556 | ND | ND | ND | 1.4E−09 | 1.8E−09 | ND | ND |
| F010301563 | ND | ND | ND | 1.0E−09 | 1.5E−09 | ND | ND |
| F010301643 | 3.6E−09 | 3.7E−09 | 100% | 3.4E−09 | 4.1E−09 | 100% | ND |
| F010301644 | 4.9E−09 | 4.4E−09 | 100% | 5.0E−09 | 5.7E−09 | 100% | ND |
| F010301645 | 4.6E−09 | 3.9E−09 | 100% | 4.2E−09 | 4.7E−09 | 100% | ND |
| F010301646 | 4.2E−09 | 3.1E−09 | 100% | 4.1E−09 | 4.4E−09 | 100% | ND |
| F010301647 | 4.7E−09 | 1.2E−08 | 80% | 4.0E−09 | 8.0E−09 | 75% | ND |
| F010301648 | 3.4E−09 | 2.1E−07 | 30% | 3.2E−09 | 8.9E−08 | 25% | ND |
| F010301649 | 4.2E−09 | 3.4E−09 | 100% | 4.1E−09 | 5.3E−09 | 100% | ND |
| F010301849 | ND | ND | ND | 1.8E−09 | 3.0E−09 | 100% | ND |
| F010301850 | 3.0E−09 | 5.4E−09 | ND | 1.8E−09 | 2.8E−09 | 100% | 1.9E−09 |
| F010302307 | ND | ND | ND | 1.9E−09 | 2.8E−09 | 100% | 2.9E−09 |
| F010302308 | ND | ND | ND | 1.3E−09 | 1.8E−09 | 100% | 2.0E−09 |
| F010302309 | ND | ND | ND | 1.5E−09 | 2.2E−09 | 100% | 2.3E−09 |
| F010302391 | 2.3E−09 | 2.7E−09 | 100% | 2.0E−09 | 1.9E−09 | 100% | ND |
| F010302392 | ND | ND | ND | ND | ND | ND | ND |
| F0103387G05 | 3.6E−09 | 2.8E−09 | 100% | 1.9E−09 | 3.1E−09 | 100% | 2.7E−09 |

ND, not determined

Part 3

| ID # | Tm [° C.] | aSEC | OD340 nm |
|---|---|---|---|
| F010301556 | 69 | ND | ND |
| F010301563 | 74 | ND | ND |
| F010301643 | 76 | ok | ok |
| F010301644 | 71 | ok | ok |
| F010301645 | 73 | ok | ok |
| F010301646 | 73 | ok | ok |
| F010301647 | 68 | ok | ok |
| F010301648 | 66 | ok | ok |
| F010301649 | 72 | ok | ok |
| F010301849 | 76 | ok | ok |
| F010301850 | 76 | ok | ok |
| F010302307 | 76 | ok | ok |
| F010302308 | 75 | ok | ok |
| F010302309 | 76 | ok | ok |
| F010302391 | 73 | ok | ok |
| F010302392 | ND | ND | ND |
| F0103387G05 | 74 | ok | ok |

ND, not determined
ok, OD360 is acceptable

### Selection of an F0103387G05 Sequence Optimization Variant

[0411] Variant F010302391 was selected as the final sequence optimization variant of F0103387G05 (see F0103387G05 SO in FIG. 29). It boasts a comparable binding on human Nav1.7α, as well as comparable aSEC and OD340 nm behavior, an improved thermal stability at low pH and a reduced Tagg (Table 36 and FIG. 30). In vitro electrophysiology experiments confirmed the low nM potency on huNav1.7α and selectivity over Nav1.4α, Nav1.5α, and Nav1.6α. All PTM liabilities (Table 32) were substituted with the exception of N73. Cell-free fermentation expression titers at CMC of the corresponding monovalent tagless variant F010302400 in P. pastoris were 2.5 g/L.

TABLE 36
Sequence optimization variant of F010387G05
Part 1

| | HEK FlpIn | | HEKa/β1 | |
|---|---|---|---|---|
| | Nav157ch14- | HEK FlpIn | (SEQ ID NO: | |
| | β1-β2- β3 | Nav157ch14 | 40) Nav1.7α | HEKa Nav1.7α |
| | (SEQ ID NO: | (SEQ ID NO: | (SEQ ID NO: | (SEQ ID NO: 1) |
| ID # | 20) EC50 [M] | 19) EC50 [M] | 1) EC50 [M] | EC50 [M] |
| F0103387G05 | 3.6E−09 | 2.8E−09 | 1.9E−09 | 3.1E−09 |
| F010302391 | 2.3E−09 | 2.7E−09 | 2.0E−09 | 1.9E−09 |

—, no activity observed @ 7 μM

Part 2

| | | HEK | HEK | HEK | HEK |
|---|---|---|---|---|---|
| | HEK | rhNav1.7α + | huNav1.4α | huNav1.5α | huNav1.6α |
| | huNav1.7α + β1 | β1-β2-β3 | (SEQ ID | (SEQ ID | (SEQ ID |
| | (SEQ ID NO: | (SEQ ID | NO: 26) | NO: 27) | NO: 28) |
| ID # | 44) IC50 [M] | NO: 4) | IC50 | IC50 | IC50 |
| F0103387G05 | ND | ND | ND | ND | ND |
| F010302391 | 3.2E−08 | — | — | — | — |

—, no activity observed @ 7 μM;
ND, not determined

Part 3

| ID # | Tm [° C.] | Tagg [° C.] | aSEC | OD340 nm | AbM | Kabat |
|---|---|---|---|---|---|---|
| F0103387G05 | 74 | >70 | ok | ok | 81% | 76% |
| F010302391 | 73 | 53 | ok | ok | 87% | 82% |

ok, OD360 is acceptable

### Example 10

### Sequence Optimization of F0103464B09

[0412] Several PTM substitution libraries were generated based on the accelerated stress data summarized in Table 37 and screened as crude periplasmic extracts in binding FACS on human, rhesus and murine Nav1.7α. No substitution libraries were generated for M77 and N53 substitutions.

TABLE 37
Results accelerated stress experiments performed on F0103464B09 variants

| | | | | Modification |
|---|---|---|---|---|
| ID # | Description | Site | Stress condition | observed |
| F0103464B09 | F0103464B09-FLAG3- | NA | 1 week @ 45° C., ±1 | 0.1% increase |
| | HIS6 | | mg/mL in D-PBS | of pre-peak |
| | | | | (SE-HPLC) |
| F010301669 | F0103464B09-HIS6 | N53 | 4 weeks @ −20, 25 | >20% |
| | | | and 40° C. | |
| F010301669 | F0103464B09-HIS6 | M77 | 10 mM H₂O₂ for 3 h | >25% |
| | | | @ RT | |
| F010301669 | F0103464B09-HIS6 | N99 | 4 weeks @ −20, 25 | >20% |
| | | | and 40° C. | |
| F010302363 | F0103464B09(L11V, T24A, | NA | 1 week @ 45° C., ±1 | 0% increase |
| | T25S, S26H, R39Q, V40A, E44Q, | | mg/mL in D-PBS | of pre-peak |
| | N53E, N58Q, F62S, A63V, | | | (SE-HPLC) |
| | S68T, M77T, T79Y, R81Q, | | | |
| | S82aN, N82bS, K83R, G88A, | | | |
| | V89L, N99S)-FLAG3-HIS6 | | | |

NA, not applicable

[0413] N99S substitution resulted in a comparable or slightly improved binding profile compared to the parental reference F0103464B09 (Table 38) and was retained.

TABLE 38
Summary screening N99X & T100X substitution libraries

| | CHO Flp-In | | CHO Flp-In | | | |
|---|---|---|---|---|---|---|
| | huNav1.7α + | | rhNav1.7α + | | HEK Jmp-In | |
| | β1-β2-β3 | | β1-β2-β3 | | muNaV1.7α | |
| | (SEQ ID NO: 3) | | (SEQ ID NO: 4) | | (SEQ ID NO: 1) | |
| | Mean | SD | Mean | SD | Mean | SD |
| | MFI | MFI | MFI | MFI | MFI | MFI |
| Parental | 51339 | 12286 | 8778 | 2711 | 10524 | 1686 |
| reference | | | | | | |
| N99A | 67236 | 10630 | 611 | 18 | 6953 | 420 |
| N99C | 2148 | 693 | 528 | 6 | 930 | 25 |
| N99D | 17565 | 2934 | 520 | 30 | 929 | 0 |
| N99E | 12920 | 1629 | 528 | 6 | 938 | 1 |
| N99F | 65663 | 17996 | 516 | 6 | 938 | 1 |
| N99G | 35986 | 4476 | 530 | 8 | 956 | 21 |
| N99I | 42100 | 3304 | 540 | 6 | 946 | 7 |
| N99K | 38359 | 756 | 537 | 1 | 923 | 8 |
| N99L | 35233 | 3218 | 536 | 10 | 919 | 19 |
| N99M | 58378 | 435 | 523 | 0 | 936 | 15 |
| N99P | 612 | 16 | 554 | 20 | 912 | 12 |
| N99Q | 44147 | 8475 | 546 | 10 | 1487 | 123 |
| N99R | 54569 | 3670 | 572 | 0 | 975 | 5 |
| N99S | 68583 | 1345 | 4867 | 116 | 18128 | 1883 |
| N99T | 43801 | 75 | 839 | 22 | 12506 | 1026 |
| N99V | 48230 | 6360 | 552 | 6 | 952 | 16 |
| N99W | 102535 | 10470 | 530 | 2 | 3324 | 3361 |
| N99Y | 50347 | 70381 | 490 | 20 | 936 | 61 |
| T100A | 46487 | 4744 | 14750 | 239 | 13767 | 654 |
| T100D | 40000 | 8423 | 526 | 1 | 1105 | 37 |
| T100E | 41841 | 2122 | 518 | 33 | 973 | 23 |
| T100F | 30496 | 1300 | 533 | 30 | 997 | 19 |
| T100G | 23035 | 1891 | 2835 | 240 | 6429 | 120 |
| T100H | 53777 | 5512 | 689 | 4 | 5147 | 210 |
| T100I | 35094 | 8735 | 541 | 13 | 1311 | 24 |
| T100K | 24860 | 2730 | 583 | 15 | 8089 | 123 |
| T100L | 32189 | 9188 | 531 | 18 | 1251 | 175 |
| T100M | 38964 | 6535 | 585 | 34 | 2629 | 593 |
| T100P | 16711 | 1179 | 1581 | 206 | 2092 | 101 |
| T100Q | 39436 | 9907 | 650 | 53 | 4295 | 787 |
| T100R | 30391 | 2087 | 626 | 49 | 10230 | 957 |
| T100S | 50304 | 5618 | 11824 | 3287 | 11225 | 1855 |
| T100V | 27409 | 1370 | 564 | 13 | 1680 | 16 |
| T100Y | 25436 | 1212 | 526 | 16 | 1121 | 43 |

### Characterization of F0103464B09 Variants

[0414] In the first round, a large number of sequence optimization substitutions were explored. In the second round, eight different affinity maturation combinations (see Example 3) were explored for improved binding to rhesus Nav1.7α, combined with the remaining sequence optimization substitutions. The variants were compared in binding FACS on human, rhesus and murine Nav1.7α (muNav1.7α), in aSEC for possible for possible multimerization, in OD340 for insoluble aggregate formation, and in the thermal shift assay for Tm (Table 40). Table 35 summarizes the effects of the explored substitutions.

[0415] In the course of the sequence optimization process, subtle drops in binding to rhesus Nav1.7α were observed for the following substitutions: R39Q, A63V, T79Y, R81Q and N99S (Table 39). R39Q substitution also resulted in a subtle drop in binding to human Nav1.7α (Table 39). The combination of these, as present in the background in which the combinatorial affinity maturation substitutions were introduced, resulted in the complete abolishment of binding to rhesus Nav1.7α for the controls that do not carry any of the affinity maturation substitutions (variants F010302365, F010302366 and F010302368 in Table 40) and the same was observed for the variants combining the A28Q G54E substitutions. Less outspoken, none of the variants combining the A28Q G54E N58Q, S26H A28Q G54E N58Q or A28Q N53E G54S N58Q substitutions reached maximum binding levels to rhesus Nav1.7α (Table 40). A similar observation was made for the variants combining the S26H V33L N53E G54S substitutions, which also resulted in a drop in binding EC50 to human Nav1.7α. The three remaining combinations S26H N53E N58Q, S26H N53E G54S N58Q and S26H A28Q N53E N58Q were highly comparable for their binding to human and rhesus Nav1.7α (Table 40). The S26H N53E N58Q combination was then selected as it achieves the same binding improvements with one mutation less than the two others.

TABLE 39
Overview of F0103464B09 substitutions

| | huNav1.7α | rhNav1.7α | muNav1.7α | | | |
|---|---|---|---|---|---|---|
| | EC50 fold | EC50 fold | EC50 fold | Tm | aSEC | |
| | change | change | change | difference | behavior | |
| | compared | compared | compared | compared | compared | OD340 |
| | to | to | to | to | to | compared to |
| Substitution | reference | reference | reference | reference | reference | reference |
| L11V | = | = | − | −2 | = | = |
| (L11V, K83R, | | | | | | |
| V89L) | | | | | | |
| T24A | = | = | −2 | +1 | = | = |
| T25S | = | = | −2 | = | = | = |
| S26H | = | +3 | ND | +3 | = | = |
| | | | | (S26H, N53E, | | |
| | | | | N58Q) | | |
| A28Q | + | + | ND | ND | ND | ND |
| V33L | = | +3 | ND | ND | ND | ND |
| R39Q | − | − | −4 | +3 | = | = |
| V40A | = | = | = | −1 | = | = |
| E44Q | = | +3 | +3 | = | = | = |
| N53E | − | + | ND | +3 | = | = |
| | | | | (S26H, N53E, | | |
| | | | | N58Q) | | |
| G54E | = | + | ND | ND | ND | ND |
| G54S | = | + | ND | ND | ND | ND |
| N58Q | + | +2 | ND | +3 | = | = |
| | | | | (S26H, N53E, | | |
| | | | | N58Q) | | |
| F62S | = | = | = | −8 | = | = |
| A63V | = | − | −2 | −5 | = | = |
| | | | | +4 (F62S) | | |
| S68T | = | = | = | +2 | = | = |
| K76N | −2 | − | −4 | = | = | = |
| M77T | = | = | = | +2 | = | = |
| T79Y | = | − | = | +2 | = | = |
| R81Q | = | − | = | +2 | = | = |
| S82aN | = | = | = | = | = | = |
| N82bS | = | = | = | −3 | = | = |
| K83R | = | = | = | −2 | = | = |
| (L11V, K83R, | | | | | | |
| V89L) | | | | | | |
| G88A | = | = | = | −5 | = | |
| V89L | = | = | = | −2 | = | = |
| (L11V, K83R, | | | | | | |
| V89L) | | | | | | |
| L93N | − | −−− | −−− | −3 | = | = |
| N99S | = | − | = | ND | ND | ND |

=, activity is equivalent reference
−, lower activity than reference
+, higher activity to reference
ND, not determined

TABLE 40
Characterization of F0103464B09 variants

Part 1

| ID # | L11 | T24 | T25 | S26H | A28Q | V33L | R39 | V40 | E44 | N53E | G54E/S | N58Q | F62 |
|---|---|---|---|---|---|---|---|---|---|---|---|---|---|
| F010301868 | V | . | . | . | . | . | . | . | . | . | . | . | . |
| F010301869 | V | . | . | . | . | . | . | . | . | . | . | . | . |
| F010301870 | V | . | . | . | . | . | . | . | . | . | . | . | . |
| F010301871 | V | A | . | . | . | . | . | . | . | . | . | . | . |
| F010301872 | V | . | S | . | . | . | . | . | . | . | . | . | . |
| F010301873 | V | . | . | . | . | . | Q | . | . | . | . | . | . |
| F010301874 | V | . | . | . | . | . | . | A | . | . | . | . | . |
| F010301875 | V | . | . | . | . | . | . | . | . | . | . | . | S |
| F010301876 | V | . | . | . | . | . | . | . | . | . | . | . | . |
| F010301877 | V | . | . | . | . | . | . | . | . | . | . | . | . |
| F010301893 | V | . | . | . | . | . | . | . | Q | . | . | . | . |
| F010301932 | V | . | . | . | . | . | . | . | . | . | . | . | . |
| F010301933 | V | . | . | . | . | . | . | . | . | . | . | . | . |
| F010301934 | V | . | . | . | . | . | . | . | . | . | . | . | . |
| F010301935 | V | . | . | . | . | . | . | . | . | . | . | . | . |
| F010301936 | V | . | . | . | . | . | . | . | . | . | . | . | . |
| F010301937 | V | . | . | . | . | . | . | . | . | . | . | . | . |
| F010301938 | V | . | . | . | . | . | . | . | . | . | . | . | . |
| F010301939 | V | . | . | . | . | . | . | . | . | . | . | . | . |
| F010302333 | V | A | S | . | Q | . | . | A | Q | . | E | . | S |
| F010302334 | V | A | S | . | Q | . | . | A | Q | . | E | Q | S |
| F010302335 | V | A | S | . | Q | . | . | A | Q | E | S | Q | S |
| F010302336 | V | A | S | H | Q | . | . | A | Q | . | E | Q | S |
| F010302337 | V | A | S | H | Q | . | . | A | Q | E | . | Q | S |
| F010302338 | V | A | S | H | . | . | . | A | Q | E | S | Q | S |
| F010302339 | V | A | S | H | . | . | . | A | Q | E | . | Q | S |
| F010302340 | V | A | S | H | . | L | | A | Q | E | S | . | S |
| F010302341 | V | A | S | . | Q | . | Q | A | Q | . | E | . | S |
| F010302342 | V | A | S | . | Q | . | Q | A | Q | . | E | Q | S |
| F010302343 | V | A | S | . | Q | . | Q | A | Q | E | S | Q | S |
| F010302344 | V | A | S | H | Q | . | Q | A | Q | . | E | Q | S |
| F010302345 | V | A | S | H | Q | . | Q | A | Q | E | . | Q | S |
| F010302346 | V | A | S | H | . | . | Q | A | Q | E | S | Q | S |
| F010302347 | V | A | S | H | . | . | Q | A | Q | E | . | Q | S |
| F010302348 | V | A | S | H | . | L | Q | A | Q | E | S | . | S |
| F010302349 | V | A | S | . | Q | . | . | A | Q | . | E | . | S |
| F010302350 | V | A | S | . | Q | . | . | A | Q | . | E | Q | S |
| F010302351 | V | A | S | . | Q | . | . | A | Q | E | S | Q | S |
| F010302352 | V | A | S | H | Q | . | . | A | Q | . | E | Q | S |
| F010302353 | V | A | S | H | Q | . | . | A | Q | E | . | Q | S |
| F010302354 | V | A | S | H | . | . | . | A | Q | E | S | Q | S |
| F010302355 | V | A | S | H | . | . | . | A | Q | E | . | Q | S |
| F010302356 | V | A | S | H | . | L | . | A | Q | E | S | . | S |
| F010302357 | V | A | S | . | Q | . | Q | A | Q | . | E | . | S |
| F010302358 | V | A | S | . | Q | . | Q | A | Q | . | E | Q | S |
| F010302359 | V | A | S | . | Q | . | Q | A | Q | E | S | Q | S |
| F010302360 | V | A | S | H | Q | . | Q | A | Q | . | E | Q | S |
| F010302361 | V | A | S | H | Q | . | Q | A | Q | E | . | Q | S |
| F010302362 | V | A | S | H | . | . | Q | A | Q | E | S | Q | S |
| F010302363 | V | A | S | H | . | . | Q | A | Q | E | . | Q | S |
| F010302364 | V | A | S | H | . | L | Q | A | Q | E | S | . | S |
| F010302365 | V | A | S | . | . | . | . | A | Q | . | . | . | S |
| F010302366 | V | A | S | . | . | . | Q | A | Q | . | . | . | S |
| F010302368 | V | A | S | . | . | . | Q | A | Q | . | . | . | S |
| F0103464B09 | . | . | . | . | . | . | . | . | . | . | . | . | . |

Part 1

| ID # | A63 | S68 | K76 | M77 | T79 | R81 | S82a | N82b | K83 | G88 | V89 | L93 | N99 |
|---|---|---|---|---|---|---|---|---|---|---|---|---|---|
| F010301868 | . | T | . | . | Y | Q | N | S | R | A | L | . | . |
| F010301869 | . | T | . | T | Y | Q | N | S | R | A | L | . | . |
| F010301870 | . | T | . | . | Y | Q | N | S | R | A | L | N | . |
| F010301871 | . | T | . | . | Y | Q | N | S | R | A | L | . | . |
| F010301872 | . | T | . | . | Y | Q | N | S | R | A | L | . | . |
| F010301873 | . | T | . | . | Y | Q | N | S | R | A | L | . | . |
| F010301874 | . | T | . | . | Y | Q | N | S | R | A | L | . | . |
| F010301875 | . | T | . | . | Y | Q | N | S | R | A | L | . | . |
| F010301876 | V | T | . | . | Y | Q | N | S | R | A | L | . | . |
| F010301877 | . | T | N | . | Y | Q | N | S | R | A | L | . | . |
| F010301893 | . | T | . | . | Y | Q | N | S | R | A | L | . | . |
| F010301932 | . | . | . | . | . | . | . | . | R | . | L | . | . |
| F010301933 | . | T | . | . | . | . | . | . | R | . | L | . | . |
| F010301934 | . | . | . | T | . | . | . | . | R | . | L | . | . |
| F010301935 | . | . | . | . | Y | . | . | . | R | . | L | . | . |
| F010301936 | . | . | . | . | . | Q | . | . | R | . | L | . | . |
| F010301937 | . | . | . | . | . | . | N | . | R | . | L | . | . |
| F010301938 | . | . | . | . | . | . | . | S | R | . | L | . | . |
| F010301939 | . | . | . | . | . | . | . | . | R | A | L | . | . |
| F010302333 | . | . | . | T | Y | Q | N | S | R | A | L | . | S |
| F010302334 | . | T | . | T | Y | Q | N | S | R | A | L | . | S |
| F010302335 | . | T | . | T | Y | Q | N | S | R | A | L | . | S |
| F010302336 | . | T | . | T | Y | Q | N | S | R | A | L | . | S |
| F010302337 | . | T | . | T | Y | Q | N | S | R | A | L | . | S |
| F010302338 | . | T | . | T | Y | Q | N | S | R | A | L | . | S |
| F010302339 | . | T | . | T | Y | Q | N | S | R | A | L | . | S |
| F010302340 | . | T | . | T | Y | Q | N | S | R | A | L | . | S |
| F010302341 | . | T | . | T | Y | Q | N | S | R | A | L | . | S |
| F010302342 | . | T | . | T | Y | Q | N | S | R | A | L | . | S |
| F010302343 | . | T | . | T | Y | Q | N | S | R | A | L | . | S |
| F010302344 | . | T | . | T | Y | Q | N | S | R | A | L | . | S |
| F010302345 | . | T | . | T | Y | Q | N | S | R | A | L | . | S |
| F010302346 | . | T | . | T | Y | Q | N | S | R | A | L | . | S |
| F010302347 | . | T | . | T | Y | Q | N | S | R | A | L | . | S |
| F010302348 | . | T | . | T | Y | Q | N | S | R | A | L | . | S |
| F010302349 | V | T | . | T | Y | Q | N | S | R | A | L | . | S |
| F010302350 | V | T | . | T | Y | Q | N | S | R | A | L | . | S |
| F010302351 | V | T | . | T | Y | Q | N | S | R | A | L | . | S |
| F010302352 | V | T | . | T | Y | Q | N | S | R | A | L | . | S |
| F010302353 | V | T | . | T | Y | Q | N | S | R | A | L | . | S |
| F010302354 | V | T | . | T | Y | Q | N | S | R | A | L | . | S |
| F010302355 | V | T | . | T | Y | Q | N | S | R | A | L | . | S |
| F010302356 | V | T | . | T | Y | Q | N | S | R | A | L | . | S |
| F010302357 | V | T | . | T | Y | Q | N | S | R | A | L | . | S |
| F010302358 | V | T | . | T | Y | Q | N | S | R | A | L | . | S |
| F010302359 | V | T | . | T | Y | Q | N | S | R | A | L | . | S |
| F010302360 | V | T | . | T | Y | Q | N | S | R | A | L | . | S |
| F010302361 | V | T | . | T | Y | Q | N | S | R | A | L | . | S |
| F010302362 | V | T | . | T | Y | Q | N | S | R | A | L | . | S |
| F010302363 | V | T | . | T | Y | Q | N | S | R | A | L | . | S |
| F010302364 | V | T | . | T | Y | Q | N | S | R | A | L | . | S |
| F010302365 | . | T | . | T | Y | Q | N | S | R | A | L | . | S |
| F010302366 | . | T | . | T | Y | Q | N | S | R | A | L | . | S |
| F010302368 | V | T | . | T | Y | Q | N | S | R | A | L | . | S |
| F0103464B09 | . | . | . | . | . | . | . | . | . | . | . | . | . |

Part 2

| | | | | CHO | | |
|---|---|---|---|---|---|---|
| | | | CHO | FlpIn | | |
| | | | FlpIn | rhNav1.7α + | | |
| | | CHO FlpIn | rhNav1.7α + | β1-β2-β3 | | |
| | CHO FlpIn | huNav1.7α + | β1-β2- β3 | (SEQ ID | | |
| | huNav1.7α + | β1-β2-β3 | (SEQ ID | NO: 4) | HEK JmpIn | HEK JmpIn |
| | β1-β2-β3 | (SEQ ID | NO: 3) | Bmax | muNav1.70α | muNav1.7α |
| | (SEQ ID NO: 3) | NO: 3) | EC50 | (including | (SEQ ID NO: | (SEQ ID NO: |
| ID # | EC50 [M] | Bmax | [M] | affmat mutations) | 45) EC50 [M] | 453) Bmax |
| F010301868 | 6.3E−09 | 98% | 6.2E−08 | ND | 1.1E−08 | ND |
| F010301869 | 7.6E−09 | 100% | 9.6E−08 | ND | 1.7E−08 | ND |
| F010301870 | 1.0E−08 | 100% | — | ND | — | ND |
| F010301871 | 5.8E−09 | 100% | 3.7E−08 | ND | 2.4E−08 | ND |
| F010301872 | 6.8E−09 | 100% | 5.7E−08 | ND | 2.1E−08 | ND |
| F010301873 | 9.0E−09 | 100% | 1.1E−07 | ND | 4.2E−08 | ND |
| F010301874 | 6.5E−09 | 100% | 5.5E−08 | ND | 1.8E−08 | ND |
| F010301875 | 6.4E−09 | 100% | 5.2E−08 | ND | 1.4E−08 | ND |
| F010301876 | 6.3E−09 | 100% | 1.1E−07 | ND | 2.3E−08 | ND |
| F010301877 | 1.3E−08 | 100% | 9.6E−08 | ND | 3.9E−08 | ND |
| F010301893 | 5.8E−09 | 100% | 2.1E−08 | ND | 3.6E−09 | ND |
| F010301932 | 4.3E−09 | 94% | 1.7E−08 | ND | 4.8E−09 | ND |
| F010301933 | 4.4E−09 | 94% | 2.1E−08 | ND | 5.3E−09 | ND |
| F010301934 | 4.3E−09 | 96% | 2.1E−08 | ND | 4.5E−09 | ND |
| F010301935 | 3.8E−09 | 94% | 2.7E−08 | ND | 5.5E−09 | ND |
| F010301936 | 4.4E−09 | 95% | 2.6E−08 | ND | 4.8E−09 | ND |
| F010301937 | 4.3E−09 | 95% | 2.0E−08 | ND | 4.8E−09 | ND |
| F010301938 | 4.8E−09 | 97% | 2.0E−08 | ND | 4.7E−09 | ND |
| F010301939 | 5.1E−09 | 96% | 2.2E−08 | ND | 6.3E−09 | ND |
| F010302333 | 4.1E−09 | 100% | — | — | ND | ND |
| F010302334 | 4.0E−09 | 100% | 1.1E−08 | 70% | ND | ND |
| F010302335 | 4.1E−09 | 100% | 1.3E−08 | 84% | ND | ND |
| F010302336 | 3.6E−09 | 100% | 9.7E−09 | 79% | ND | ND |
| F010302337 | 3.9E−09 | 100% | 6.8E−09 | 100% | ND | 74% |
| F010302338 | 3.4E−09 | 100% | 7.9E−09 | 100% | ND | ND |
| F010302339 | 4.3E−09 | 100% | 6.8E−09 | 100% | 8.7E−09 | 61% |
| F010302340 | 4.6E−09 | 100% | 1.3E−08 | 96% | ND | ND |
| F010302341 | 5.3E−09 | 100% | — | — | ND | ND |
| F010302342 | 4.0E−09 | 100% | 1.6E−08 | 61% | ND | ND |
| F010302343 | 6.4E−09 | 100% | 1.8E−08 | 84% | ND | ND |
| F010302344 | 4.3E−09 | 100% | 1.3E−08 | 78% | ND | ND |
| F010302345 | 4.9E−09 | 100% | 1.2E−08 | 96% | ND | ND |
| F010302346 | 5.0E−09 | 100% | 1.2E−08 | 99% | ND | ND |
| F010302347 | 4.6E−09 | 100% | 9.6E−09 | 100% | 1.4E−08 | 48% |
| F010302348 | 6.7E−09 | 100% | 1.4E−08 | 95% | ND | ND |
| F010302349 | 4.4E−09 | 100% | — | — | ND | ND |
| F010302350 | 3.5E−09 | 100% | 1.5E−08 | 46% | ND | ND |
| F010302351 | 5.6E−09 | 100% | 1.5E−08 | 72% | ND | ND |
| F010302352 | 3.6E−09 | 100% | 1.1E−08 | 60% | ND | ND |
| F010302353 | 4.2E−09 | 100% | 7.9E−09 | 93% | ND | ND |
| F010302354 | 4.2E−09 | 100% | 7.9E−09 | 96% | ND | ND |
| F010302355 | 3.5E−09 | 100% | 6.8E−09 | 97% | 2.1E−08 | 30% |
| F010302356 | 5.3E−09 | 100% | 1.2E−08 | 81% | ND | ND |
| F010302357 | 5.3E−09 | 100% | — | — | ND | ND |
| F010302358 | 4.5E−09 | 100% | 3.7E−08 | 37% | ND | ND |
| F010302359 | 6.4E−09 | 100% | 2.4E−08 | 66% | ND | ND |
| F010302360 | 3.5E−09 | 100% | 1.5E−08 | 58% | ND | ND |
| F010302361 | 4.8E−09 | 100% | 1.1E−08 | 92% | ND | ND |
| F010302362 | 5.4E−09 | 100% | 1.4E−08 | 89% | ND | ND |
| F010302363 | 4.2E−09 | 100% | 9.3E−09 | 96% | 4.8E−08 | 18% |
| F010302364 | 7.2E−09 | 100% | 1.7E−08 | 74% | ND | ND |
| F010302365 | 3.1E−09 | 100% | — | — | ND | ND |
| F010302366 | 3.7E−09 | 100% | — | — | ND | ND |
| F010302368 | 3.9E−09 | 100% | — | — | ND | ND |
| F0103464B09 | 5.2E−09 | 99% | 1.8E−08 | 33% | 6.3E−09 | 74% |

ND, not determined

Part 3

| ID # | Tm [° C.] | aSEC | OD340 nm |
|---|---|---|---|
| F010301868 | 66 | ok | ok |
| F010301869 | 67 | ok | ok |
| F010301870 | 63 | ok | ok |
| F010301871 | 67 | ok | ok |
| F010301872 | 66 | ok | ok |
| F010301873 | 69 | ok | ok |
| F010301874 | 65 | ok | ok |
| F010301875 | 58 | ok | ok |
| F010301876 | 61 | ok | ok |
| F010301877 | 66 | ok | ok |
| F010301893 | 66 | ok | ok |
| F010301932 | 64 | ok | ok |
| F010301933 | 66 | ok | ok |
| F010301934 | 66 | ok | ok |
| F010301935 | 66 | ok | ok |
| F010301936 | 66 | ok | ok |
| F010301937 | 64 | ok | ok |
| F010301938 | 61 | ok | ok |
| F010301939 | 59 | ok | ok |
| F010302333 | ND | ND | ND |
| F010302334 | ND | ND | ND |
| F010302335 | ND | ND | ND |
| F010302336 | ND | ND | ND |
| F010302337 | ND | ND | ND |
| F010302338 | ND | ND | ND |
| F010302339 | 63 | ok | ok |
| F010302340 | ND | ND | ND |
| F010302341 | ND | ND | ND |
| F010302342 | ND | ND | ND |
| F010302343 | ND | ND | ND |
| F010302344 | ND | ND | ND |
| F010302345 | ND | ND | ND |
| F010302346 | ND | ND | ND |
| F010302347 | 66 | ok | ok |
| F010302348 | ND | ND | ND |
| F010302349 | ND | ND | ND |
| F010302350 | ND | ND | ND |
| F010302351 | ND | ND | ND |
| F010302352 | ND | ND | ND |
| F010302353 | ND | ND | ND |
| F010302354 | ND | ND | ND |
| F010302355 | 66 | ok | ok |
| F010302356 | ND | ND | ND |
| F010302357 | ND | ND | ND |
| F010302358 | ND | ND | ND |
| F010302359 | ND | ND | ND |
| F010302360 | ND | ND | ND |
| F010302361 | ND | ND | ND |
| F010302362 | ND | ND | ND |
| F010302363 | 70 | ok | ok |
| F010302364 | ND | ND | ND |
| F010302365 | 60 | ok | ok |
| F010302366 | 63 | ok | ok |
| F010302368 | 66 | ok | ok |
| F0103464B09 | 66 | ok | ok |

ND, not determined

### Selection of an F0103464B09 Sequence Optimization Variant

[0416] Variant F010302363 was selected as the final sequence optimization variant of F0103464B09 (see F0103464B09_SO in FIG. 31). It boasts a strongly improved binding on rhesus Nav1.7α, reduced binding to muNav1.7a, as well as comparable aSEC and OD340 nm behavior and an improved thermal stability (Table 41). In vitro electrophysiology experiments confirmed the low nM potency on huNav1.7α and rhNav1.7α and selectivity over Nav1.4α, Nav1.5α, and Nav1.6α. All PTM liabilities (Table 37) were successfully substituted. Cell-free fermentation expression titers at CMC of the corresponding monovalent tagless variant F01032390 in P. pastoris were 2.0 g/L.

TABLE 41
Sequence optimization variant of F0103464B09
Part 1

| | CHO FlpIn | | CHO FlpIn | | |
|---|---|---|---|---|---|
| | huNav1.7α + | CHO FlpIn | rhNav1.7α + | | |
| | β1-β2-β3 | rhNav1.7α + | β1- β2-β3 | HEK JmpIn | HEK JmpIn |
| | (SEQ ID | β1- β2-β3 | (SEQ ID NO: | muNav1.7α | muNav1.7α |
| | NO: 3) EC50 | (SEQ ID NO: | 4) Bmax | (SEQ ID NO: | (SEQ ID NO: |
| ID # | [M] | 4) EC50 [M] | (including | 45) EC50 [M] | 45) Bmax |
| F0103464B09 | 5.2E−09 | 1.8E−08 | 33% | 6.3E−09 | 74% |
| F010302363 | 4.2E−09 | 9.3E−09 | 96% | 4.8E−08 | 18% |

—, no activity observed @ 7 μM

Part 2

| | HEK | HEK | HEK | HEK | HEK |
|---|---|---|---|---|---|
| | huNav1.7α + | rhNav1.7α + | huNav1.4 | huNav1.5 | huNav1.6α |
| | β1 (SEQ ID | β1-β2-β3 | (SEQ ID | (SEQ ID | (SEQ ID |
| | NO: 44) IC50 | (SEQ ID NO: | NO: 26) | NO: 27) | NO: 28) |
| ID # | [M | 4) IC50 [M] | IC50 [M] | IC50 [M] | IC50 [M] |
| F0103464B09 | ND | ND | ND | ND | ND |
| F010302363 | 1.1E−08 | 3.6E−08 | — | — | — |

—, no activity observed @ 7 μM;
ND, not determined

Part 3

| | | | | OD340 | | |
|---|---|---|---|---|---|---|
| ID # | Tm [° C.] | Tagg [° C.] | aSEC | nm | AbM | Kabat |
| F0103464B09 | 66 | Inconclusive | ok | ok | 72% | 69% |
| F010302363 | 70 | 71 | ok | ok | 85% | 80% |

ok, acceptable

### Example 11

### Identification of Anti-Navβ Subunit ISVDs

[0417] The aim of this campaign was to identify lead candidates that bind to different, non-overlapping epitopes compared to previously identified extracellular Nav1.7α binders (see previous examples). To this end, a selection and screening strategy was designed to identify lead candidates that would be able to bind in an avid fashion, when combined with a previously identified extracellular Nav1.7α binding ISVD.

[0418] Different immune repertoires were cloned downstream of an anchor building block [(F103275B05(N93R), a rhNav1.7α cross-reactive variant] separated by a long 50GS linker, resulting in bivalent phage display libraries.

[0419] Selections using high quality proteoliposome (PL) preparations or cell lines as antigen were performed on bivalent libraries derived from immunization schedules in which the animals first were repeatedly administered with different forms of full-length DNA, followed by up to four administrations with PL or membrane extract (ME), followed again by multiple administrations with different forms of full-length DNA. Crude periplasmic extracts containing bivalent ISVDs enriched by the selection process, were screened in binding FACS and competition FACS on different cell lines. Table 42 summarizes the screening data of five lead ISVD candidates F0103478E09, F0103492E09, F0103495F09, F0103500E03 and F0103505D08 (for the screening each F0103478E09, F0103492E09, F0103495F09, F0103500E03 and F0103505D08 was linked at the N-terminus to the C-terminus of an F103275B05(N93R)-50GS moiety to form a bivalent ISVD) for which the totality of the data in comparison to a control (bivalent ISVD F010300702 comprising an irrelevant anti-RSV building block linked at the N-terminus to the C-terminus of an F103275B05(N93R)-50GS moiety) suggests that they bind in an avid fashion to Nav1.7α:
[0420] selective binding on hu & rhNav1.7α in HEK & CHO at higher levels than the average of control F010300702
[0421] remaining binding after competition with anchor building block at higher levels than the average of control F010300702

[0422] Sequence analysis revealed that these lead candidates are unrelated and belong to different ISVD families (last column of (Table 42). Most of these lead candidates and/or related family members with high sequence similarity were identified multiple times throughout different selection and screening campaigns. Further characterization revealed that these lead candidates did not bind to Nav1.7α but instead were Navβ1 or Navβ2 binders.

TABLE 42
Overview binding and competition FACS screening of selected Navβ binders
Part 1

| | | | CHO | CHO |
|---|---|---|---|---|
| | | | Flp-In | Flp-In |
| | | | huNav1.5- | huNav1.5- |
| | CHO | CHO | β1-β2-β3 in | β1-β2-β3 in |
| | Flp-In | Flp-In | competition | competition |
| | huNav1.7- | huNav1.5- | vs. 1 μM | vs. 1 μM |
| | β1-β2-β3 | β1-β2-β3 | IRR00092 | F010300703 |
| ID # | (MFI) | (MFI) | (MFI) | (MFI) |
| F0103PMP478E09 | 82782 | 1079 | 2065 | 833 |
| F0103PMP492E09 | 40185 | 559 | 1860 | 825 |
| F0103PMP495F09 | 35600 | 483 | 930 | 645 |
| F0103PMP500E03 | 22450 | 521 | 975 | 852 |
| F0103PMP505D08 | 106009 | 891 | 964 | 845 |
| F010300702 (n = 15) | 1567 | 662 | 684 | 653 |

Part 2

| | CHO | | CHO | CHO |
|---|---|---|---|---|
| | Flp-In | CHO | Flp-In | Flp-In |
| | huNav1.7- | Flp-In | rhNav1.7- | rhNav1.7- |
| | β1-β2-β3 in | huNav1.7- | β1-β2-β3 in | β1-β2-β3 in |
| | competition | β1-β2-β3 in | competition | competition |
| | vs. 1 μM | competition | vs. 1 μM | vs. 1 μM |
| | IRR00092 | vs. 1 μM | IRR00092 | F010300703 |
| ID # | (MFI) | [symbol] | (MFI) | (MFI) |
| F0103PMP478E09 | 136552 | 28773 | 139028 | 60635 |
| F0103PMP492E09 | 104334 | 11981 | 111433 | 25186 |
| F0103PMP495F09 | 93301 | 7161 | 90368 | 6280 |
| F0103PMP500E03 | 33732 | 5376 | 96947 | 21477 |
| F0103PMP505D08 | 95366 | 9240 | 108235 | 22537 |
| F010300702 (n = 15) | 4120 | 812 | 5168 | 721 |

Part 3

| | | HEK | | HEK | |
|---|---|---|---|---|---|
| | | Flp-In | HEK | Flp-In | |
| | HEK293 | huNav1.5- | Flp-In | huNav157chim14- | |
| | Flp-In | β1-β2-β3 | huNav157chim14 | β1-β2-β3 | |
| ID # | (MFI) | (MFI) | (MFI) | (MFI) | Family |
| F0103PMP478E09 | 1052 | 877 | 799 | 1234 | 1037 |
| F0103PMP492E09 | 1205 | 1656 | 58377 | 132919 | 1044 |
| F0103PMP495F09 | 1090 | 976 | 45146 | 127724 | 1040 |
| F0103PMP500E03 | 1084 | 1106 | 47300 | 87229 | 1042 |
| F0103PMP505D08 | 1041 | 1198 | 78390 | 136037 | 1053 |
| F010300702 (n = 15) | 1132 | 946 | 27719 | 15389 | NA |

NA, not applicable [symbol]
indicates data missing or illegible when filed

### Binding Characterization Monovalent β-Subunit Binders

[0423] ISVD F0103240B04 was identified by means of binding ELISA as a candidate Navβ2 binder. Binding FACS (FIG. 33) and binding ELISA (FIG. 34B) experiments with purified monovalent protein suggest that F0103240B04 is indeed a potent Navβ2 binder. Five ISVDs, F0103478E09, F0103492E09, F0103495F09, F0103500E03 and F0103505D08, identified by binding and competition FACS (Table 42) were further characterized as purified monovalent protein. The combined data from the binding ELISA (FIGS. 34A-34C) and binding FACS experiments (FIGS. 35A-35D and FIGS. 36A-36E) suggest that F0103478E09 is a weak Navβ1 binder and that F0103492E09, F0103500E03, and F0103505D08 are weak Navβ2 binders. F0103495F09 was not evaluated as purified monovalent protein in the binding ELISA or binding FACS experiments using transiently transfected cells because binding FACS experiments using stable cell lines suggest that it recognizes a HEK293-specific cell background marker (See FIG. 36E). Additional competition FACS experiments with Nav1.7α-Navβ-subunit bispecific ISVDs; however, classify F103495F09 as a weak Navβ1 binder, similar to F0103478E09.

### Binding ELISA

[0424] In general, 10 μg/mL of HEK huNav1.7α-Navβ1 (huNav1.7-(31) expressing cells and HEK293T null ME cells were coated in bicarbonate buffer (pH9.6) overnight at 4° C. in 384-well HB Spectraplate (catalog #6007500, Perkin Elmer). Wells were blocked with 4% Marvel in PBS. After addition of periplasmic extracts (either pen (1/5) or purified ISVD) diluted in 2% Marvel (Premier Foods Group, St Albans, UK) in PBS, FLAG3-tagged ISVD binding was detected using a mouse anti-Flag-HRP conjugate (catalog #A8592-1MG, Sigma) and a subsequent enzymatic reaction in the presence of the substrate esTMB (3,3′,5,5′-tetramentylbenzidine) (catalog ##esTMB, SDT). Plates were read out on a MultiSkan device (ThermoFisher Scientific) at OD450. EC50 values were calculated using four-parameter logistic curves in GraphPad Prism7.

[0425] Alternatively, 3 μg/mL of HEK huNav1.7α-Navβ1-Navβ2-Navβ3 (huNav1.7-β1-β2-β3) cl. 11 PL was used as coated antigen in combination with detection of CMYC3-tagged ISVDs by mouse anti-c-myc biotin conjugate (catalog #MCA2200B Serotec) followed by extravidin-HRP conjugate (catalog #E2886, Sigma-Aldrich).

### Example 12

### Nav1.7α-Navβ Bispecific ISVDs

[0426] Bispecific leads were generated, fusing different anti-Navβ ISVDs to the C-terminus of the rhesus cross-reactive anti-Nav1.7α ISVD F103275B05(N93R) by means of a long flexible 50GS linker. The bispecifics were evaluated for their ability to compete for binding with the monovalent F0103275B05(N73R) variant to Nav1.7α in FACS experiments on different cell lines. The data shown in Table 43, FIGS. 37A-37B, and FIGS. 38A-38C reveals 10-to 1000-fold improved competition FACS IC50 values compared to the monovalent F0103275B05(N73R) control (F010300468 in table). This holds true for both Navfllbinders and Navβ2 binders on cell lines expressing the relevant counterparts. Also, stronger Navβ binders bring about greater IC50 improvements to the respective bispecifics. The monovalent Navβ binders were not able to displace F0103275B05(N73R) from Nav1.7α by themselves (FIGS. 38A-38C).

TABLE 43
Summary competition FACS of anti-Nav1.7α-Navβ bispecific ISVDs
Part 1

| | | | HEK | HEK |
|---|---|---|---|---|
| | | | huNav1.7α | huNav1.7α-β1 |
| | | Classification | vs. EC25 of | vs. EC25 of |
| | | 2^{nd} | F103275B05(N93R) | F103275B05(N93R) |
| ID # | Description | ISVD | IC50 [M] | IC50 [M] |
| F010302375 | F0103275B05(E1D, N93R)-50GS- | weak | 1.1 × 10⁻⁰⁷ | 4.3 × 10⁻⁰⁹ |
| | F0103478E09(L108Q) + FLAG3- | Navβ1 | | |
| | HIS6 | binder | | |
| F010302377 | F0103275B05(E1D, N93R)-50GS- | weak | 8.6 × 10⁻⁰⁸ | 1.4 × 10⁻⁰⁷ |
| | F0103492E09 + FLAG3-HIS6 | Navβ2 | | |
| | | binder | | |
| F010302378 | F0103275B05(E1D, N93R)-50GS- | weak | 8.0 × 10⁻⁰⁸ | 5.2 × 10⁻⁰⁹ |
| | F0103495F09 + FLAG3-HIS6 | Navβ1 | | |
| | | binder | | |
| F010302379 | F0103275B05(E1D, N93R)-50GS- | weak | 8.5 × 10⁻⁰⁸ | 1.5 × 10⁻⁰⁷ |
| | F0103500E03(P14A, L108Q) + | Navβ2 | | |
| | FLAG3-HIS6 | binder | | |
| F010302380 | F0103275B05(E1D, N93R)-50GS- | weak | 6.7 × 10⁻⁰⁸ | 1.1 × 10⁻⁰⁷ |
| | F0103505D08(L108Q) + FLAG3- | Navβ2 | | |
| | HIS6 | binder | | |
| F010300191 | F0103275B05-50GS-F0103240B04 + | strong | 6.7 × 10⁻⁰⁸ | 1.1 × 10⁻⁰⁷ |
| | FLAG3-HIS6 | Navβ2 | | |
| | | binder | | |
| F010300468 | F0103275B05(N93R) + FLAG3-HIS6 | NA | 4.9 × 10⁻⁰⁸ | 6.7 × 10⁻⁰⁸ |

Part 2

| | | | HEK | CHO | CHO |
|---|---|---|---|---|---|
| | | | FlpIn | FlpIn | FlpIn |
| | | | huNav1.7α- | huNav1.7α- | rhNav1.7α- |
| | | | β1-β2-β3 vs. | β1-β2-β3 vs. | β1-β2-β3 vs. |
| | | Classification | EC25 of | EC25 of | EC40 of |
| | | 2^{nd} | F103275B05(N93R) | F103275B05(N93R) | F103275B05(N93R) |
| ID # | Description | ISVD | IC50 [M] | IC50 [M] | IC50 [M] |
| F010302375 | F0103275B05(E1D, N93R)- | weak | 1.0 × 10⁻⁰⁸ | 1.2 × 10⁻⁰⁸ | 6.5 × 10⁻⁰⁹ |
| | 50GS-F0103478E09(L108Q) + | Navβ1 | | | |
| | FLAG3-HIS6 | binder | | | |
| F010302377 | F0103275B05(E1D, N93R)- | weak | 5.2 × 10⁻⁰⁹ | 4.1 × 10⁻⁰⁹ | 1.2 × 10⁻⁰⁹ |
| | 50GS-F0103492E09-FLAG3 + | Navβ2 | | | |
| | HIS6 | binder | | | |
| F010302378 | F0103275B05(E1D, N93R)- | weak | 1.2 × 10⁻⁰⁸ | 1.0 × 10⁻⁰⁸ | 6.6 × 10⁻⁰⁹ |
| | 50GS-F0103495F09-FLAG3 + | Navβ1 | | | |
| | HIS6 | binder | | | |
| F010302379 | F0103275B05(E1D, N93R)- | weak | 1.6 × 10⁻⁰⁸ | 1.9 × 10⁻⁰⁸ | 4.8 × 10⁻⁰⁹ |
| | 50GS- | Navβ2 | | | |
| | F0103500E03(P14A, L108Q)- | binder | | | |
| | FLAG3 + HIS6 | | | | |
| F010302380 | F0103275B05(E1D, N93R)- | weak | 8.7 × 10⁻⁰⁹ | 8.1 × 10⁻⁰⁹ | 2.0 × 10⁻⁰⁹ |
| | 50GS- | Navβ2 | | | |
| | F0103505D08(L108Q)- | binder | | | |
| | FLAG3 + HIS6 | | | | |
| F010300191 | F0103275B05-50GS- | strong | 1.0 × 10⁻¹⁰ | ND | ND |
| | F0103240B04-FLAG3 + | Navβ2 | | | |
| | HIS6 | binder | | | |
| F010300468 | F103275B05(N93R) + | NA | 9.7 × 10⁻⁰⁸ | 1.3 × 10⁻⁰⁷ | 7.7 × 10⁻⁰⁸ |
| | FLAG3-HIS6 | | | | |

NA, not applicable
NA, not applicable;
ND, not determined

### Example 13

[0427] This example shows that in vivo performance may be enhanced by half-life extension (HLE), which may be particularly useful in therapeutic formats for chronic pain indications. Two types of HLE formats were evaluated: fusion to (i) the anti-SA building block ALB23002 or to (ii) huFc.

[0428] A number of pilot experiments were performed with the rhesus cross-reactive affinity maturation variant F010300659 of F0103275B05. The addition of ALB23002 to the C-terminus of F010300659 separated by a flexible GlySer linker resulted in a two- to five-fold drop in binding competition (Table 44) and functional (Table 45 and FIG. 7A) potency. In the presence of a saturating concentration of human SA, an additional two- to ten-fold reduction in potency was observed which appeared to be more pronounced for the shorter 9GS compared to the longer 35GS linker construct.

TABLE 44
Summary competition FACS of ALB23002 HLE Nav1.7 ISVDs in presence/absence of human SA

| | | | CHO FlpIn | | | CHO FlpIn | |
|---|---|---|---|---|---|---|---|
| | | | huNav1.7-β1-β2- | | | rhNav1.7-β1-β2- | |
| | | CHO FlpIn | β3 vs. EC25 | | CHO FlpIn | β3 vs. EC25 | |
| | | huNav1.7-β1-β2- | of 275B05(N93R) | | rhNav1.7-β1-β2- | of 275B05(N93R) | |
| | | β3 vs. EC25 | IC50 [M] + | Human | β3 vs. EC25 | IC50 [M] + | Human |
| | | of 275B05(N93R) | 50 μM | SA | of 275B05(N93R) | 50 μM | SA |
| ID # | Description | IC50 [M] | human SA | ratio | IC50 [M] | human SA | ratio |
| F010301452 | F0103275B05(S27P, | 3.0 × 10⁻⁰⁸ | ND | NA | 1.6 × 10⁻⁰⁸ | ND | NA |
| | I28V, S50Y, N53P, | | | | | | |
| | G55W, S56D, T57W, | | | | | | |
| | N93R, A94W) | | | | | | |
| F010301465 | F0103275B05(E1D, | 9.8 × 10⁻⁰⁸ | 4.8 × 10⁻⁰⁷ | 5 | 6.0 × 10⁻⁰⁸ | 2.8 × 10⁻⁰⁷ | 5 |
| | S27P, I28V, S50Y, | | | | | | |
| | N53P, G55W, S56D, | | | | | | |
| | T57W, N93R, A94W)- | | | | | | |
| | 35GS-ALB23002 | | | | | | |
| F010301555 | F0103275B05(E1D, | 1.4 × 10⁻⁰⁷ | 1.2 × 10⁻⁰⁶ | 8 | 9.2 × 10⁻⁰⁸ | 8.8 × 10⁻⁰⁷ | 10 |
| | S27P, 128V, S50Y, | | | | | | |
| | N53P, G55W, S56D, | | | | | | |
| | T57W, N93R, A94W)- | | | | | | |
| | 9GS-ALB23002 | | | | | | |

NA, not applicable;
ND, not determined

TABLE 45
Summary QPatch electrophysiology of ALB23002 HLE Nav1.7 ISVDs in presence/absence of human SA

| | | | HEK | | | HEK | |
|---|---|---|---|---|---|---|---|
| | | HEK | rhNav1.7-β1-β2-β3 + | Human | HEK | huNav1.7-β1 + | Human |
| | | rhNav1.7-β1-β2-β3 | 10 μM human | SA | huNav1.7-β1 | 10 μM human | SA |
| ID # | Description | IC50 [M] | SA IC50 [M] | ratio | IC50 [M] | SA IC50 [M] | ratio |
| F010301452 | F0103275B05(S27P, | 1.8 × 10⁻⁰⁸ | ND | NA | 2.1 × 10⁻⁰⁸ | ND | NA |
| | I28V, S50Y,N53P, | | | | | | |
| | G55W, S56D, T57W, | | | | | | |
| | N93R, A94W) | | | | | | |
| F010301465 | F0103275B05(E1D, | 5.7 × 10⁻⁰⁸ | 1.0 × 10⁻⁰⁷ | 2 | 4.3 × 10⁻⁰⁸ | 2.8 × 10₋₀₇ | 7 |
| | S27P, I28V, S50Y, | | | | | | |
| | N53P, G55W, S56D, | | | | | | |
| | T57W, N93R, A94W)- | | | | | | |
| | 35GS-ALB23002 | | | | | | |
| F010301555 | F0103275B05(E1D, | 3.5 × 10⁻⁰⁸ | 2.6 × 10⁻⁰⁷ | 7 | 4.7 × 10⁻⁰⁸ | 3.4 × 10⁻⁰⁷ | 7 |
| | S27P, I28V, S50Y, | | | | | | |
| | N53P, G55W, S56D, | | | | | | |
| | T57W, N93R, A94W)- | | | | | | |
| | 9GS-ALB23002 | | | | | | |

NA, not applicable;
ND, not determined

[0429] A number of huFc fusions were generated with the F0103265B04. The huFc moiety is based on hIgG1 with LALA and D265S mutations to reduce the interaction with FcγR. F0103265B04 is fused to the N-terminus of the huFc separated by a number of linkers with differing flexibilities as described elsewhere (Klein et al. Protein Eng Des Sel. 27:325-30 (2014), which is incorporated herein by reference in its entirety). Comparison of the different constructs in binding FACS revealed EC50 values comparable to monovalent F0103265B04 (Table 46), with the exception of 22ARO which suffered from a drop in potency. Interestingly, functional characterization using a single pulse electrophysiology protocol (FIG. 7A) revealed potencies highly favorable compared to monovalent F0103265B04 (last column of Table 46). Future experiments should determine whether these improvements are Fc- or linker-mediated.

TABLE 46
Summary binding FACS and Qpatch of F0103265B04-
Fc-fusions with different linkers

| | | FACS | | |
|---|---|---|---|---|
| | Description | HEK | FACS | |
| | [linker nomenclature | huNav1.7α- | HEK | Qpatch |
| | according to Klein et al. | β1-β2-β3 | huNav1.7α- | HEK |
| | 2014 Protein Eng Des Sel | cl.11 | β1 | huNav1.7α |
| ID # | 27:325] | EC50 [M] | EC50 [M] | IC50 [M] |
| F0103265B04 | F0103265B04-FLAG3- | ND | ND | 1.2 × 10⁻⁰⁷ |
| | HIS6 | | | |
| 22ARO | F0103265B04-L10 | 2.0 × 10⁻⁰⁸ | 2.9 × 10⁻⁰⁸ | 1.1 × 10⁻⁰⁷ |
| | GPZP-Fc | | | |
| 23ARO | F0103265B04-L1 hIgG- | 6.0 × 10⁻⁰⁹ | 8.8 × 10⁻⁰⁹ | 3.6 × 10⁻⁰⁸ |
| | Fc | | | |
| 24ARO | F0103265B04-L17 GS1- | 6.9 × 10⁻⁰⁹ | 9.2 × 10⁻⁰⁹ | 2.0 × 10⁻⁰⁸ |
| | Fc | | | |
| 25ARO | F0103265B04-L20 GS5- | 6.1 × 10⁻⁰⁹ | 8.2 × 10⁻⁰⁹ | 4.7 × 10⁻⁰⁸ |
| | Fc | | | |
| 26ARO | F0103265B04-L3 | 8.5 × 10⁻⁰⁹ | 1.4 × 10⁻⁰⁸ | 4.0 × 10⁻⁰⁹ |
| | GPGcP-Fc | | | |

ND, not determined

Another set of Nav1.7 binder-Fc fusion proteins was generated, this time with a 5GS linker separating the two moieties, and tested for binding and electrophysiology (Table 47) following the protocol depicted in FIG. 7A. Here, affinity maturation variants F010300659 (derived from F0103275B05) and F010301656 (derived from F0103387G04) were compared to parental F0103275B05. Addition of the Fc moiety does not appear to have a major impact on the functional potency.

TABLE 47
Summary binding FACS and QPatch characterization of ISVD-5GS-Fc-fusions

| | | | FACS | Qpatch | Qpatch |
|---|---|---|---|---|---|
| | | FACS | HEK | HEK | HEK |
| | | HEK | huNav1.7α- | rhNav1.7α- | huNav1.7α- |
| | | huNav1.7α | β1 | β1-β2-β3 | β1 |
| ID # | Description | EC50 [M] | EC50 [M] | IC50 [M] | IC50 [M] |
| F0103275B05 | F0103275B05- | 1.3 × 10⁻⁰⁸ | 1.3 × 10⁻⁰⁸ | ND | ND |
| | FLAG3 + HIS6 | | | | |
| 65ASP | F0103275B05- | 2.1 × 10⁻⁰⁸ | 4.5 × 10⁻⁰⁸ | ND | 1.2 × 10⁻⁰⁷ |
| | 5GS-Fc | | | | |
| F010300659 | F0103275B05(S27P, | 5.4 × 10⁻⁰⁹ | 1.1 × 10⁻⁰⁸ | 1.8 × 10⁻⁰⁷ | 8.5 × 10⁻⁰⁸ |
| | I28V, S50Y, N53P, | | | | |
| | G55W, S56D, T57W, | | | | |
| | N93R, A94W)- | | | | |
| | FLAG3 + HIS6 | | | | |
| 66ASP | F010300659-5GS- | 6.1 × 10⁻⁰⁸ | 4.2 × 10⁻⁰⁸ | 5.2 × 10⁻⁰⁸ | 9.2 × 10⁻⁰⁸ |
| | Fc | | | | |
| F010301656 | F0103387G04(K33R, | 4.9 × 10⁻⁰⁹ | 4.2 × 10⁻⁰⁹ | 6.0 × 10⁻⁰⁹ | 1.8 × 10⁻⁰⁸ |
| | S50Y, S56D, N93R)- | | | | |
| | FLAG3 + HIS6 | | | | |
| 69AVB | F010301656-5GS- | 1.1 × 10⁻⁰⁸ | 9.0 × 10⁻⁰⁹ | 8.0 × 10⁻⁰⁹ | 1.3 × 10⁻⁰⁸ |
| | Fc | | | | |

ND, not determined

[0430] In a last experiment, the potencies of different HLE versions of the F0103387G04 affinity maturation variant F010301656 were compared in competition FACS and electrophysiology on huNav1.7 and rhNav1.7 (Table 48 and Table 49). As described above, the addition of an ALB23002 or Fc moiety as HLE has no outspoken effect on the potency. The presence of a saturating concentration of human SA results in a ±5-fold drop in the potency of the ALB23002 fusion.

TABLE 48
Summary competition FACS of different HLE versions of ′1656 in presence/absence of human SA

| | | | CHO FlpIn | | | CHO FlpIn | |
|---|---|---|---|---|---|---|---|
| | | | huNav1.7α-β1- | | | rhNav1.7α-β1- | |
| | | CHO FlpIn | β2-β3 vs. EC25 | | CHO FlpIn | β2-β3 vs. EC25 | |
| | | huNav1.7α-β1- | of 275B05(N93R) | | rhNav1.7α-β1- | of 275B05(N93R) | |
| | | β2-β3 vs. EC25 | IC50 [M] + | Human | β2-β3 vs. EC25 | IC50 [M] + | Human |
| | | of 275B05(N93R) | 50 μM | SA | of 275B05(N93R) | 50 μM | SA |
| ID # | Description | IC50 [M] | human SA | ratio | IC50 [M] | human SA | ratio |
| F010301656 | F0103387G04(K33R, | 3.7 × 10⁻⁰⁸ | 3.9 × 10⁻⁰⁸ | 1 | 1.4 × 10⁻⁰⁸ | 1.6 × 10⁻⁰⁸ | 1 |
| | S50Y, S56D, N93R)- | | | | | | |
| | FLAG3-HIS6 | | | | | | |
| F010301940 | F0103387G04(E1D, | 3.5 × 10⁻⁰⁸ | 1.9 × 10⁻⁰⁷ | 5 | 1.3 × 10⁻⁰⁸ | 8.0 × 10⁻⁰⁸ | 6 |
| | K33R, S50Y, S56D, | | | | | | |
| | N93R)-35GS- | | | | | | |
| | ALB23002 | | | | | | |
| 69AVB | F010301656- | ND | ND | | ND | ND | |
| | 5GS-Fc | | | | | | |

ND, not determined

TABLE 49
Summary QPatch electrophysiology of different HLE versions of F010301656 in presence/absence of human SA

| | | | HEK | | | HEK | | |
|---|---|---|---|---|---|---|---|---|
| | | HEK | rhNav1.7α-β1-β2-β3 + | Human | HEK | huNav1.7α-β1 + | Human | HEK |
| | | rhNav1.7α-β1-β2-β3 | 10 μM human | SA | huNav1.7α-β1 | 10 □ M human | SA | ratNav1.7α |
| ID # | Description | IC50 [M] | SA IC50 [M] | ratio | IC50 [M] | SA IC50 [M] | ratio | IC50 [M] |
| F010301656 | F0103387G04 | 6.0 × 10⁻⁰⁹ | ND | ND | 1.8 × 10⁻⁰⁸ | ND | ND | ND |
| | (K33R, S50Y, | | | | | | | |
| | S56D, N93R)- | | | | | | | |
| | FLAG3-HIS6 | | | | | | | |
| F010301940 | F0103387G04 | 1.6 × 10⁻⁰⁸ | 5.0 × 10⁻⁰⁸ | 3 | 4.6 × 10⁻⁰⁸ | 1.5 × 10⁻⁰⁷ | 3 | 3.7 × 10⁻⁰⁸ |
| | (E1D, K33R, | | | | | | | |
| | S50Y, S56D, | | | | | | | |
| | N93R)-35GS- | | | | | | | |
| | ALB23002 | | | | | | | |
| 69AVB | F010301656- | 8.0 × 10⁻⁰⁹ | ND | ND | 1.3 × 10⁻⁰⁸ | 2.6 × 10⁻⁰⁸ | 2 | 2.1 × 10⁻⁰⁸ |
| | 5GS-Fc | | | | | | | |

ND, not determined

### Example 14

### Electrophysiological Characterization of Nav1.7a Selective ISVDs on the Automated Patch Clamp System QPatch.

[0431] Whole-cell currents were measured from cells stably expressing human, rhesus, or rat Nav1.7α, 1.6α, 1.5α, 1.4α channels using the QPatch HT™ (Sophion Bioscience). Cells were grown to 60-70% confluence in T175 cell culture flasks. Cells were lifted with Accutase™ and single cell suspensions generated with two million cells/mL.

[0432] Experiments were performed at room temperature (25-29° C.). Human and rhesus Nav1.7α currents were measured holding cells −85 mV and applying 30 ms test pulses to −20 mV at a frequency 0.1 Hz. Rat Nav1.7α currents were measured holding cells at −75 mV applying 30 ms test pulses to −20 mV at a frequency 0.1 Hz. Human and rhesus Nav1.6α, Nav1.5α, and Nav1.4α were held at −85 mV, −95 mV and −80 mV, respectively. The following solutions were used: Internal Solution (in mM): 30 CsCl, 5 HEPES, 10 EGTA, 120 CsF, 5 NaF, 2 MgCl₂, pH=7.3 with CsOH; External solutions (in mM) for human and rhesus Nav1.7α: 40 NaCl, 120 NMDG, 1 KCl, 0.5 MgCl₂, 5 HEPES, 2.7 CaCl₂, pH to 7.3 with NaOH; for rat Nav1.7α: 150 NaCl, 5 KCl, 2 CaCl₂, 1 MgCl₂, 10 HEPES, 12 Dextrose, pH 7.3 with NaOH. Sodium currents were monitored for at least five minutes in vehicle before addition of test articles. Double additions of test article were made to QPlate™ wells to achieve equilibrium. Current inhibition was measured after 60 pulses in test article. ProTX-II was used as positive control.

[0433] IC50 values, based on three concentrations, were calculated using a built-in four parameter logistic function (Hill equation): f(x)=Iₘᵢₙ+(Iₘₐₓ−Iₘᵢₙ)/(1±(IC50/[x])^{h}); Iₘᵢₙ=minimal current (fixed to 0); Iₘₐₓ=maximal current (fixed to a value of 100); IC50=half maximal inhibitory concentration; h=Hill coefficient.

[0434] Table 50, Table 51, Table 52, Table 53, Table 54, and Table 55 show the results. In Tables 50-55, N.E. means “no effect” and ND means “not determined”.

TABLE 50
Qpatch IC50s (nM) of Parental clones
Part 1

| | Human | | | | Rhesus |
|---|---|---|---|---|---|
| | Nav1.7α + | Human | Human | Human | Nav1.7α + |
| ID # | β1 | Nav1.6α | Nav1.5α | Nav1.4α | β1-β2-β3 |
| F0103265B04 | 120 | N.E. @14.5 μM | ND | ND | ND |
| F0103362B08 | 1 | ND | ND | ND | N.E. |
| F0103454D07 | 38 | ND | ND | ND | ND |
| F010346B09 | 7 | ND | ND | ND | 166 |

Part 2

| | Rhesus | Rhesus | Rhesus | Rat |
|---|---|---|---|---|
| ID # | Nav1.6α | Nav1.5α | Nav1.4α | Nav1.7α |
| F0103265B04 | ND | ND | ND | ND |
| F0103362B08 | ND | ND | ND | ND |
| F0103454D07 | ND | ND | ND | ND |
| F0103464B09 | ND | ND | ND | ND |

TABLE 51
Qpatch IC50s (nM) of F0103275B05 and F0103387G05 affinity-matured variants
Part 1

| | Human | | | | Rhesus |
|---|---|---|---|---|---|
| | Nav1.7α + | Human | Human | Human | Nav1.7α + |
| ID # | β1 | Nav1.6α | Nav1.5α | Nav1.4α | β1-β2-β3 |
| F10301656* | 13 | N.E. | N.E. | N.E. | 8 |
| | | @30 μM | @30 μM | @30 μM | |
| F010302383 | 22 | ND | ND | ND | 3 |
| F010300659 | 85 | N.E. | ND | ND | 199 |
| | | @6.3 μM | | | |
| F010300880 | 27 | ND | ND | ND | 122 |
| F010300900 | 196 | ND | ND | ND | 36 |
| F010300948 | 315 | ND | ND | ND | 58 |
| F010300990 | 249 | ND | ND | ND | 101 |
| F010300477 | 96 | ND | ND | ND | 1192 |
| F010300631 | 73 | ND | ND | ND | 173 |
| F010300684 | 202 | ND | ND | ND | 212 |

Part 2

| | Rhesus | Rhesus | Rhesus | Rat |
|---|---|---|---|---|
| ID # | Nav1.6α | Nav1.5α | Nav1.4α | Nav1.7α |
| F10301656* | N.E. @30 μM | N.E. @30 μM | N.E. @30 μM | 21 |
| F010302383 | N.E. @7 μM | N.E. @7 μM | N.E. @7 μM | ND |
| F010300659 | ND | ND | ND | ND |
| F010300880 | ND | ND | ND | ND |
| F010300900 | ND | ND | ND | ND |
| F010300948 | ND | ND | ND | ND |
| F010300990 | ND | ND | ND | ND |
| F010300477 | ND | ND | ND | ND |
| F010300631 | ND | ND | ND | ND |
| F010300684 | ND | ND | ND | ND |

*ISVD with human IgG1 Fc

TABLE 52
Qpatch IC50s (nM) of F0103265A11 affinity-matured variants
Part 1

| | Human | | | | Rhesus |
|---|---|---|---|---|---|
| | Nav1.7α + | Human | Human | Human | Nav1.7α + |
| ID # | β1 | Nav1.6α | Nav1.5α | Nav1.4α | β1-β2-β3 |
| F010301162 | 32 | ND | ND | ND | ND |
| F010301191 | 63 | ND | ND | ND | ND |
| F010301080 | 14 | ND | ND | ND | ND |
| F010301090 | 22 | ND | ND | ND | ND |
| F010301129 | 126 | ND | ND | ND | ND |

Part 2

| | Rhesus | Rhesus | Rhesus | Rat |
|---|---|---|---|---|
| ID # | Nav1.6α | Nav1.5α | Nav1.4α | Nav1.7α |
| F010301162 | ND | ND | ND | ND |
| F010301191 | ND | ND | ND | ND |
| F010301080 | ND | ND | ND | ND |
| F010301090 | ND | ND | ND | ND |
| F010301129 | ND | ND | ND | ND |

TABLE 53
Qpatch IC50s (nM) of F0103387G05 affinity-matured variants
Part 1

| | Human | | | | Rhesus |
|---|---|---|---|---|---|
| | Nav1.7α + | Human | Human | Human | Nav1.7α + |
| ID # | β1 | Nav1.6α | Nav1.5α | Nav1.4α | β1-β2-β3 |
| F010301558 | 8 | ND | ND | ND | ND |
| F010301559 | 12 | ND | ND | ND | ND |
| F010301563 | 5 | ND | ND | ND | ND |
| F010301566 | 18 | ND | ND | ND | ND |
| F010302391 | 32 | ND | ND | ND | ND |

Part 2

| | Rhesus | Rhesus | Rhesus | Rat |
|---|---|---|---|---|
| ID # | Nav1.6α | Nav1.5α | Nav1.4α | Nav1.7α |
| F010301558 | ND | ND | ND | ND |
| F010301559 | ND | ND | ND | ND |
| F010301563 | ND | ND | ND | ND |
| F010301566 | ND | ND | ND | ND |
| F010302391 | N.E. @7 μM | N.E. @7 μM | N.E. @7 μM | N.E. @7 μM |

TABLE 54
Qpatch IC50s (nM) of F0103464B09 affinity-matured variants
Part 1

| | Human | | | | Rhesus |
|---|---|---|---|---|---|
| | Nav1.7α + | Human | Human | Human | Nav1.7α + |
| ID # | β1 | Nav1.6α | Nav1.5α | Nav1.4α | β1-β2-β3 |
| F010302363 | 7 | ND | ND | ND | 166 |

Part 2

| | Rhesus | Rhesus | Rhesus | Rat |
|---|---|---|---|---|
| ID # | Nav1.6α | Nav1.5α | Nav1.4α | Nav1.7α |
| F010302363 | N.E. @7 μM | N.E. @7 μM | N.E. @7 μM | N.E. @7 μM |

TABLE 55
Qpatch IC50s (nM) of anti-Nav1.7α-Navβ bispecific ISVDs
Part 1

| | | | Human | Human |
|---|---|---|---|---|
| | | Human | Nav1.7α + | Nav1.2α + |
| ID # | Description | Nav1.7α | β1-β2-β3 | β1-β2 |
| F010300468 | F0103275B05(N93R) | 57 | 99 | ND |
| F010302375 | F0103275B05(E1D, N93R)-50GS- | 123 | 2.6 | N.E. |
| | F0103478E09(L108Q)-FLAG3- | | | |
| | HIS6 | | | |
| F010302378 | F0103275B05(E1D, N93R)-50GS- | 115 | 2.3 | N.E. |
| | F0103495F09-FLAG3-HIS6 | | | |
| F010302377 | F0103275B05(E1D, N93R)-50GS- | 74 | 0.8 | ND |
| | F0103492E09-FLAG3-HIS6 | | | |
| F010302379 | F0103275B05(E1D, N93R)-50GS- | 111 | 3.4 | ND |
| | F0103500E03(P14A, L108Q)- | | | |
| | FLAG3-HIS6 | | | |

Part 2

| | | | Rhesus |
|---|---|---|---|
| | | Rhesus | Nav1.7α + |
| ID # | Description | Nav1.7α | β1-β2-β3 |
| F010300468 | F0103275B05(N93R) | ND | ND |
| F010302375 | F0103275B05(E1D, N93R)-50GS- | 93 | 2.8 |
| | F0103478E09(L108Q)-FLAG3- | | |
| | HIS6 | | |
| F010302378 | F0103275B05(E1D, N93R)-50GS- | 103 | 2.6 |
| | F0103495F09-FLAG3-HIS6 | | |
| F010302377 | F0103275B05(E1D, N93R)-50GS- | 104 | 75 |
| | F0103492E09-FLAG3-HIS6 | | |
| F010302379 | F0103275B05(E1D, N93R)-50GS- | 133 | 131 |
| | F0103500E03(P14A, L108Q)- | | |
| | FLAG3-HIS6 | | |

[0435] The amino acid and nucleotide sequences for the Nav1.7 binders, CDRs, and other molecules disclosed herein are set forth Table 56.

TABLE 56
Table of Sequences

| SEQ | | |
|---|---|---|
| ID | | |
| NO: | Description | Sequence |
| 1 | huNav1.7 (alpha- | MAMLPPPGPQSFVHFTKQSLALIEQRIAERKSKEPK |
| | subunit) | EEKKDDDEEAPKPSSDLEAGKQLPFIYGDIPPGMVS |
| | | EPLEDLDPYYADKKTFIVLNKGKTIFRFNATPALYM |
| | | LSPFSPLRRISIKILVHSLFSMLIMCTILTNCIFMTMN |
| | | NPPDWTKNVEYTFTGIYTFESLVKILARGFCVGEFT |
| | | FLRDPWNWLDFVVIVFAYLTEFVNLGNVSALRTFR |
| | | VLRALKTISVIPGLKTIVGALIQSVKKLSDVMILTVF |
| | | CLSVFALIGLQLFMGNLKHKCFRNSLENNETLESIM |
| | | NTLESEEDFRKYFYYLEGSKDALLCGFSTDSGQCPE |
| | | GYTCVKIGRNPDYGYTSFDTFSWAFLALFRLMTQD |
| | | YWENLYQQTLRAAGKTYMIFFVVVIFLGSFYLINLI |
| | | LAVVAMAYEEQNQANIEEAKQKELEFQQMLDRLK |
| | | KEQEEAEAIAAAAAEYTSIRRSRIMGLSESSSETSKL |
| | | SSKSAKERRNRRKKKNQKKLSSGEEKGDAEKLSKS |
| | | ESEDSIRRKSFHLGVEGHRRAHEKRLSTPNQSPLSIR |
| | | GSLFSARRSSRTSLFSFKGRGRDIGSETEFADDEHSI |
| | | FGDNESRRGSLFVPHRPQERRSSNISQASRSPPMLP |
| | | VNGKMHSAVDCNGVVSLVDGRSALMLPNGQLLPE |
| | | GTTNQIHKKRRCSSYLLSEDMLNDPNLRQRAMSRA |
| | | SILTNTVEELEESRQKCPPWWYRFAHKFLIWNCSPY |
| | | WIKFKKCIYFIVMDPFVDLAITICIVLNTLFMAMEH |
| | | HPMTEEFKNVLAIGNLVFTGIFAAEMVLKLIAMDP |
| | | YEYFQVGWNIFDSLIVTLSLVELFLADVEGLSVLRS |
| | | FRLLRVFKLAKSWPTLNMLIKIIGNSVGALGNLTLV |
| | | LAIIVFIFAVVGMQLFGKSYKECVCKINDDCTLPRW |
| | | HMNDFFHSFLIVFRVLCGEWIETMWDCMEVAGQA |
| | | MCLIVYMMVMVIGNLVVLNLFLALLLSSFSSDNLT |
| | | AIEEDPDANNLQIAVTRIKKGINYVKQTLREFILKAF |
| | | SKKPKISREIRQAEDLNTKKENYISNHTLAEMSKGH |
| | | NFLKEKDKISGFGSSVDKHLMEDSDGQSFIHNPSLT |
| | | VTVPIAPGESDLENMNAEELSSDSDSEYSKVRLNRS |
| | | SSSECSTVDNPLPGEGEEAEAEPMNSDEPEACFTDG |
| | | CVRRFSCCQVNIESGKGKIWWNIRKTCYKIVEHSW |
| | | FESFIVLMILLSSGALAFEDIYIERKKTIKIILEYADKI |
| | | FTYIFILEMLLKWIAYGYKTYFTNAWCWLDFLIVD |
| | | VSLVTLVANTLGYSDLGPIKSLRTLRALRPLRALSR |
| | | FEGMRVVVNALIGAIPSIMNVLLVCLIFWLIFSIMGV |
| | | NLFAGKFYECINTTDGSRFPASQVPNRSECFALMN |
| | | VSQNVRWKNLKVNFDNVGLGYLSLLQVATFKGW |
| | | TIIMYAAVDSVNVDKQPKYEYSLYMYIYFVVFIIFG |
| | | SFFTLNLFIGVIIDNFNQQKKKLGGQDIFMTEEQKK |
| | | YYNAMKKLGSKKPQKPIPRPGNKIQGCIFDLVTNQ |
| | | AFDISIMVLICLNMVTMMVEKEGQSQHMTEVLYWI |
| | | NVVFIILFTGECVLKLISLRHYYFTVGWNIFDFVVVI |
| | | ISIVGMFLADLIETYFVSPTLFRVIRLARIGRILRLVK |
| | | GAKGIRTLLFALMMSLPALFNIGLLLFLVMFIYAIFG |
| | | MSNFAYVKKEDGINDMFNFETFGNSMICLFQITTSA |
| | | GWDGLLAPILNSKPPDCDPKKVHPGSSVEGDCGNP |
| | | SVGIFYFVSYIIISFLVVVNMYIAVILENFSVATEEST |
| | | EPLSEDDFEMFYEVWEKFDPDATQFIEFSKLSDFAA |
| | | ALDPPLLIAKPNKVQLIAMDLPMVSGDRIHCLDILF |
| | | AFTKRVLGESGEMDSLRSQMEERFMSANPSKVSYE |
| | | PITTTLKRKQEDVSATVIQRAYRRYRLRQNVKNISS |
| | | IYIKDGDRDDDLLNKKDMAFDNVNENSSPEKTDAT |
| | | SSTTSPPSYDSVTKPDKEKYEQDRTEKEDKGKDSK |
| | | ESKK |
| 2 | rhNav1.7 (alpha- | MAMLPPPGPQSFVHFTKQSLALIEQRIAERKSKEPK |
| | subunit) | EEKKDDDEEAPKPSSDLEAGKQLPFIYGDIPPGMVS |
| | | EPLEDLDPYYADKKTFIVLNKGKTIFRFNATPALYM |
| | | LSPFSPLRRISIKILVHSLFSMLIMCTILTNCIFMTMN |
| | | NPPDWTKNVEYTFTGIYTFESLVKILARGFCVGEFT |
| | | FLRDPWNWLDFVVIVFAYLTEFVNLGNVSALRTFR |
| | | VLRALKTISVIPGLKTIVGALIQSVKKLSDVMILTVF |
| | | CLSVFALIGLQLFMGNLKHKCFRNSLENNETLESIM |
| | | NTLESEEDFRKYFYYLEGSKDALLCGFSTDSGQCPE |
| | | GYTCVKIGRNPDYGYTSFDTFSWAFLALFRLMTQD |
| | | YWENLYQQTLRAAGKTYMIFFVVVIFLGSFYLINLI |
| | | LAVVAMAYEEQNQANIEEAKQKELEFQQMLDRLK |
| | | KEQEEAEAIAAAAAEYTSIRRSRIMGLSESSSETSKL |
| | | SSKSAKERRNRRKKKNQKKLSSGEEKGDAEKLSKS |
| | | ESEDSIRRKSFHLGVEGHRRAHEKRLSTPNQSPLSIR |
| | | GSLFSARRSSRTSLFSFKGRGRDIGSETEFADDEHSI |
| | | FGDNESRRGSLFVPHRPQERRSSNISQASRSPPMLP |
| | | VNGKMHSAVDCNGVVSLVDGRSALMLPNGQLLPE |
| | | GTTNQIHKKRRCSSYLLSEDMLNDPNLRQRAMSRA |
| | | SILTNTVEELEESRQKCPPWWYRFAHKFLIWNCSPY |
| | | WIKFKKCIYFIVMDPFVDLAITICIVLNTLFMAMEH |
| | | HPMTEEFKNVLAIGNLVFTGIFAAEMVLKLIAMDP |
| | | YEYFQVGWNIFDSLIVTLSLVELFLADVEGLSVLRS |
| | | FRLLRVFKLAKSWPTLNMLIKIIGNSVGALGNLTLV |
| | | LAIIVFIFAVVGMQLFGKSYKECVCKINDDCTLPRW |
| | | HMNDFFHSFLIVFRVLCGEWIETMWDCMEVAGQA |
| | | MCLIVYMMVMVIGNLVVLNLFLALLLSSFSSDNLT |
| | | AIEEDPDANNLQIAVTRIKKGINYVKQTLREFILKAF |
| | | SKKPKISREIRQAEDLNTKKENYISNHTLAEMSKGH |
| | | NFLKEKDKISGFGSSVDKHLMEDSDGQSFIHNPSLT |
| | | VTVPIAPGESDLENMNAEELSSDSDSEYSKVRLNRS |
| | | SSSECSTVDNPLPGEGEEAEAEPMNSDEPEACFTDG |
| | | CVRRFSCCQVNIESGKGKIWWNIRKTCYKIVEHSW |
| | | FESFIVLMILLSSGALAFEDIYIERKKTIKIILEYADKI |
| | | FTYIFILEMLLKWIAYGYKTYFTNAWCWLDFLIVD |
| | | VSLVTLVANTLGYSDLGPIKSLRTLRALRPLRALSR |
| | | FEGMRVVVNALIGAIPSIMNVLLVCLIFWLIFSIMGV |
| | | NLFAGKFYECINTTDGSRFPASQVPNRSECFALMN |
| | | VSQNVRWKNLKVNFDNVGLGYLSLLQVATFKGW |
| | | TIIMYAAVDSVNVDKQPKYEYSLYMYIYFVVFIIFG |
| | | SFFTLNLFIGVIIDNFNQQKKKLGGQDIFMTEEQKK |
| | | YYNAMKKLGSKKPQKPIPRPGNKIQGCIFDLVTNQ |
| | | AFDISIMVLICLNMVTMMVEKEGQSQHMTEVLYWI |
| | | NVVFIILFTGECVLKLISLRHYYFTVGWNIFDFVVVI |
| | | ISIVGMFLADLIETYFVSPTLFRVIRLARIGRILRLVK |
| | | GAKGIRTLLFALMMSLPALFNIGLLLFLVMFIYAIFG |
| | | MSNFAYVKKEDGINDMFNFETFGNSMICLFQITTSA |
| | | GWDGLLAPILNSKPPDCDPKKVHPGSSVEGDCGNP |
| | | SVGIFYFVSYIIISFLVVVNMYIAVILENFSVATEEST |
| | | EPLSEDDFEMFYEVWEKFDPDATQFIEFSKLSDFAA |
| | | ALDPPLLIAKPNKVQLIAMDLPMVSGDRIHCLDILF |
| | | AFTKRVLGESGEMDSLRSQMEERFMSANPSKVSYE |
| | | PITTTLKRKQEDVSATVIQRAYRRYRLRQNVKNISS |
| | | IYIKDGDRDDDLLNKKDMAFDNVNENSSPEKTDAT |
| | | SSTTSPPSYDSVTKPDKEKYEQDRTEKEDKGKDSK |
| | | ESKK |
| 3 | huNav1.7-beta1-beta2- | MAMLPPPGPQSFVHFTKQSLALIEQRIAERKSKEPK |
| | beta3 viral P2A | EEKKDDDEEAPKPSSDLEAGKQLPFIYGDIPPGMVS |
| | sequences italics; beta1- | EPLEDLDPYYADKKTFIVLNKGKTIFRFNATPALYM |
| | beta2-beta3 are in bold | LSPFSPLRRISIKILVHSLFSMLIMCTILTNCIFMTMN |
| | | NPPDWTKNVEYTFTGIYTFESLVKILARGFCVGEFT |
| | | FLRDPWNWLDFVVIVFAYLTEFVNLGNVSALRTFR |
| | | VLRALKTISVIPGLKTIVGALIQSVKKLSDVMILTVF |
| | | CLSVFALIGLQLFMGNLKHKCFRNSLENNETLESIM |
| | | NTLESEEDFRKYFYYLEGSKDALLCGFSTDSGQCPE |
| | | GYTCVKIGRNPDYGYTSFDTFSWAFLALFRLMTQD |
| | | YWENLYQQTLRAAGKTYMIFFVVVIFLGSFYLINLI |
| | | LAVVAMAYEEQNQANIEEAKQKELEFQQMLDRLK |
| | | KEQEEAEAIAAAAAEYTSIRRSRIMGLSESSSETSKL |
| | | SSKSAKERRNRRKKKNQKKLSSGEEKGDAEKLSKS |
| | | ESEDSIRRKSFHLGVEGHRRAHEKRLSTPNQSPLSIR |
| | | GSLFSARRSSRTSLFSFKGRGRDIGSETEFADDEHSI |
| | | FGDNESRRGSLFVPHRPQERRSSNISQASRSPPMLP |
| | | VNGKMHSAVDCNGVVSLVDGRSALMLPNGQLLPE |
| | | GTTNQIHKKRRCSSYLLSEDMLNDPNLRQRAMSRA |
| | | SILTNTVEELEESRQKCPPWWYRFAHKFLIWNCSPY |
| | | WIKFKKCIYFIVMDPFVDLAITICIVLNTLFMAMEH |
| | | HPMTEEFKNVLAIGNLVFTGIFAAEMVLKLIAMDP |
| | | YEYFQVGWNIFDSLIVTLSLVELFLADVEGLSVLRS |
| | | FRLLRVFKLAKSWPTLNMLIKIIGNSVGALGNLTLV |
| | | LAIIVFIFAVVGMQLFGKSYKECVCKINDDCTLPRW |
| | | HMNDFFHSFLIVFRVLCGEWIETMWDCMEVAGQA |
| | | MCLIVYMMVMVIGNLVVLNLFLALLLSSFSSDNLT |
| | | AIEEDPDANNLQIAVTRIKKGINYVKQTLREFILKAF |
| | | SKKPKISREIRQAEDLNTKKENYISNHTLAEMSKGH |
| | | NFLKEKDKISGFGSSVDKHLMEDSDGQSFIHNPSLT |
| | | VTVPIAPGESDLENMNAEELSSDSDSEYSKVRLNRS |
| | | SSSECSTVDNPLPGEGEEAEAEPMNSDEPEACFTDG |
| | | CVRRFSCCQVNIESGKGKIWWNIRKTCYKIVEHSW |
| | | FESFIVLMILLSSGALAFEDIYIERKKTIKIILEYADKI |
| | | FTYIFILEMLLKWIAYGYKTYFTNAWCWLDFLIVD |
| | | VSLVTLVANTLGYSDLGPIKSLRTLRALRPLRALSR |
| | | FEGMRVVVNALIGAIPSIMNVLLVCLIFWLIFSIMGV |
| | | NLFAGKFYECINTTDGSRFPASQVPNRSECFALMN |
| | | VSQNVRWKNLKVNFDNVGLGYLSLLQVATFKGW |
| | | TIIMYAAVDSVNVDKQPKYEYSLYMYIYFVVFIIFG |
| | | SFFTLNLFIGVIIDNFNQQKKKLGGQDIFMTEEQKK |
| | | YYNAMKKLGSKKPQKPIPRPGNKIQGCIFDLVTNQ |
| | | AFDISIMVLICLNMVTMMVEKEGQSQHMTEVLYWI |
| | | NVVFIILFTGECVLKLISLRHYYFTVGWNIFDFVVVI |
| | | ISIVGMFLADLIETYFVSPTLFRVIRLARIGRILRLVK |
| | | GAKGIRTLLFALMMSLPALFNIGLLLFLVMFIYAIFG |
| | | MSNFAYVKKEDGINDMFNFETFGNSMICLFQITTSA |
| | | GWDGLLAPILNSKPPDCDPKKVHPGSSVEGDCGNP |
| | | SVGIFYFVSYIIISFLVVVNMYIAVILENFSVATEEST |
| | | EPLSEDDFEMFYEVWEKFDPDATQFIEFSKLSDFAA |
| | | ALDPPLLIAKPNKVQLIAMDLPMVSGDRIHCLDILF |
| | | AFTKRVLGESGEMDSLRSQMEERFMSANPSKVSYE |
| | | PITTTLKRKQEDVSATVIQRAYRRYRLRQNVKNISS |
| | | IYIKDGDRDDDLLNKKDMAFDNVNENSSPEKTDAT |
| | | SSTTSPPSYDSVTKPDKEKYEQDRTEKEDKGKDSK |
| | | ESKKSGRGSGATNFSLLKQAGDVEENPGPMGRLLA |
| | | LVVGAALVSSACGGCVEVDSETEAVYGMTFKIL |
| | | CISCKRRSETNAETFTEWTFRQKGTEEFVKILRY |
| | | ENEVLQLEEDERFEGRVVWNGSRGTKDLQDLSI |
| | | FITNVTYNHSGDYECHVYRLLFFENYEHNTSVV |
| | | KKIHIEVVDKANRDMASIVSEIMMYVLIVVLTIW |
| | | LVAEMIYCYKKIAAATETAAQENASEYLAITSES |
| | | KENCTGVQVAEGSGATNFSLLKQAGDVEENPGPM |
| | | HRDAWLPRPAFSLTGLSLFFSLVPPGRSMEVTVP |
| | | ATLNVLNGSDARLPCTFNSCYTVNHKQFSLNWT |
| | | YQECNNCSEEMFLQFRMKIINLKLERFQDRVEF |
| | | SGNPSKYDVSVMLRNVQPEDEGIYNCYIMNPPD |
| | | RHRGHGKIHLQVLMEEPPERDSTVAVIVGASVG |
| | | GFLAVVILVLMVVKCVRRKKEQKLSTDDLKTEE |
| | | EGKTDGEGNPDDGAKGSGATNFSLLKQAGDVEEN |
| | | PGPMPAFNRLFPLASLVLIYWVSVCFPVCVEVPS |
| | | ETEAVQGNPMKLRCISCMKREEVEATTVVEWF |
| | | YRPEGGKDFLIYEYRNGHQEVESPFQGRLQWN |
| | | GSKDLQDVSITVLNVTLNDSGLYTCNVSREFEFE |
| | | AHRPFVKTTRLIPLRVTEEAGEDFTSVVSEIMMY |
| | | ILLVFLTLWLLIEMIYCYRKVSKAEEAAQENASD |
| | | YLAIPSENKENSAVPVEE |
| 4 | rhNav1.7-beta1-beta2- | MAMLPPPGPQSFVHFTKQSLALIEQRIAERKSKEPK |
| | beta3 viral P2A | EEKKDDDEEAPKPSSDLEAGKQLPFIYGDIPPGMVS |
| | sequences italics; beta1- | EPLEDLDPYYADKKTFIVLNKGKTIFRFNATPALYM |
| | beta2-beta3 are in bold | LSPFSPLRRISIKILVHSLFSMLIMCTILTNCIFMTMS |
| | | NPPDWTKNVEYTFTGIYTFESLVKILARGFCVGEFT |
| | | FLRDPWNWLDFIVIVFAYLTEFVNLGNVSALRTFR |
| | | VLRALKTISVIPGLKTIVGALIQSVKKLSDVMILTVF |
| | | CLSVFALIGLQLFMGNLKHKCVQNSLVNNETLESI |
| | | MNTLESEEDFRKYFYYLEGSKDALLCGFSTDSGQC |
| | | PEGYTCMKIGRNPDYGYTSFDTFSWAFLALFRLMT |
| | | QDYWENLYQQTLRAAGKTYMIFFVVVIFLGSFYLI |
| | | NLILAVVAMAYEEQNQANIEEAKQKELEFQQMLD |
| | | RLKKEQEEAEAIAAAAAEYTSIRRSRIMGLSESSSET |
| | | SKLSSKSAKERRNRRKKKNQKKLSSGEEKGDAEKL |
| | | SKSDSEENIRRKSFHLGVEGHRRAHEKRLSTPSQSP |
| | | LSIRGSLFSARRSSRTSLFSFKGRGRDIGSETEFADD |
| | | EHSIFGDNESRRGSLFVPHRPQERRSSNISQASRSPPI |
| | | LPVNGKMHSAVDCNGVVSLVDGRSALMLPNGQLL |
| | | PEGTTNQIHKKRRCSSYLLSEDMLNDPNLRQRAMS |
| | | RASILTNTVEELEESRQKCPPWWYRFAHKFLIWNC |
| | | SPYWIKFKKCIYFIVMDPFVDLAITICIVLNTLFMAM |
| | | EHHPMTEEFKNVLAIGNLVFTGIFAAEMVLKLIAM |
| | | DPYEYFQVGWNIFDSLIVTLSLVELFLADVEGLSVL |
| | | RSFRLLRVFKLAKSWPTLNMLIKIIGNSVGALGNLT |
| | | LVLAIIVFIFAVVGMQLFGKSYKECVCKINDDCTLP |
| | | RWHMNDFFHSFLIVFRVLCGEWIETMWDCMEVAG |
| | | QAMCLIVYMMVMVIGNLVVLNLFLALLLSSFSSDN |
| | | LTAIEEDPDANNLQIAVTRIKKGINYVKQTLREFILK |
| | | TFSKKPKISREIRQTEDLNTKKENYISNYTLAEMSK |
| | | GHNFLKEKDKISGFGSCVDKYLMEDSDGQSFIHNP |
| | | SLTVTVPIAPGESDLENMNTEELSSDSDSEYSKVRL |
| | | NQSSSSECSTVDNPLPGEGEEAEAEPMNSDEPEACF |
| | | TDGCVRRFSCCQVNIESGKGKIWWNIRKTCYKIVE |
| | | HSWFESFIVLMILLSSGALAFEDIYIERKKTIKIILEY |
| | | ADKIFTYIFILEMLLKWIAYGYKTYFTNAWCWLDF |
| | | LIVDVSLVTLVANTLGYSDLGPIKSLRTLRALRPLR |
| | | ALSRFEGMRVVVNALIGAIPSIMNVLLVCLIFWLIFS |
| | | IMGVNLFAGKFYECINTTDGSRFPASQVPNRSECFA |
| | | LMNVSQNVRWKNLKVNFDNVGLGYLSLLQVATF |
| | | KGWTIIMYAAVDSVNVDKQPKYEYSLYMYIYFVIF |
| | | IIFGSFFTLNLFIGVIIDNFNQQKKKLGGQDIFMTEEQ |
| | | KKYYNAMKKLGSKKPQKPIPRPGNKIQGCIFDLVT |
| | | NQAFDISIMVLICLNMVTMMVEKEGQSPYMTDVL |
| | | YWINVVFIILFTGECVLKLISLRYYYFTIGWNIFDFV |
| | | VVIISIVGMFLADLIETYFVSPTLFRVIRLARIGRILRL |
| | | VKGAKGIRTLLFALMMSLPALFNIGLLLFLVMFIYA |
| | | IFGMSNFAYVKKEDGINDMFNFETFGNSMICLFQIT |
| | | TSAGWDGLLAPILNSKPPDCDPKKVHPGSSVEGDC |
| | | GNPSVGIFYFVSYIIISFLVVVNMYIAVILENFSVATE |
| | | ESTEPLSEDDFEMFYEVWEKFDPDATQFIEYNKLSD |
| | | FAAALDPPLLIAKPNKVQLIAMDLPMVSGDRIHCL |
| | | DILFAFTKRVLGESGEMDSLRSQMEERFMSANPSK |
| | | VSYEPITTTLKRKQEDVSATVIQRAYRRYRLRQNV |
| | | KNISSIYIKDGDRDDDLLNKKDMAFDNVNENSSPE |
| | | KTDATSSTTSPPSYDSVTKPDKEKYEQDRTEKEDK |
| | | GKDSKESKKSGRGSGATNFSLLKQAGDVEENPGPM |
| | | GRLLALVVGAALVSSACGGCVEVDSETEAVYG |
| | | MTFKILCISCKRRSETNAETFTEWTFRQKGTEEF |
| | | VKILRYENEVLQLEEDERFEGRVVWNGSRGTKD |
| | | LQDLSIFITNVTYNHSGDYECHVYRLLFFENYEH |
| | | NTSVVKKIHIEVVDKANRDMASIVSEIMMYVLIV |
| | | VLTIWLVAEMIYCYKKIAAATETAAQENASEYL |
| | | AITSESKENCTGVQVAEGSGATNFSLLKQAGDVEE |
| | | NPGPMHRDAWLPRPAFSLTGLSLFFSLVPPGRS |
| | | MEVTVPATLNVLNGSDARLPCTFNSCYTVNHKQ |
| | | FSLNWTYQECNNCSEEMFLQFRMKIINLKLERF |
| | | QDRVEFSGNPSKYDVSVMLRNVQPEDEGIYNCYI |
| | | MNPPDRHRGHGKIHLQVLMEEPPERDSTVAVIV |
| | | GASVGGFLAVVILVLMVVKCVRRKKEQKLSTD |
| | | DLKTEEEGKTDGEGNPDDGAKGSGATNFSLLKQA |
| | | GDVEENPGPMPAFNRLFPLASLVLIYWVSVCFPV |
| | | CVEVPSETEAVQGNPMKLRCISCMKREEVEATT |
| | | VVEWFYRPEGGKDFLIYEYRNGHQEVESPFQGR |
| | | LQWNGSKDLQDVSITVLNVTLNDSGLYTCNVSR |
| | | EFEFEAHRPFVKTTRLIPLRVTEEAGEDFTSVVS |
| | | EIMMYILLVFLTLWLLIEMIYCYRKVSKAEEAA |
| | | QENASDYLAIPSENKENSAVPVEE |
| 5 | huNav1.7(F276V)- | MAMLPPPGPQSFVHFTKQSLALIEQRIAERKSKEPK |
| | beta1-beta2-beta3 viral | EEKKDDDEEAPKPSSDLEAGKQLPFIYGDIPPGMVS |
| | P2A sequences italics; | EPLEDLDPYYADKKTFIVLNKGKTIFRFNATPALYM |
| | beta1-beta2-beta3 are in | LSPFSPLRRISIKILVHSLFSMLIMCTILTNCIFMTMN |
| | bold | NPPDWTKNVEYTFTGIYTFESLVKILARGFCVGEFT |
| | | FLRDPWNWLDFVVIVFAYLTEFVNLGNVSALRTFR |
| | | VLRALKTISVIPGLKTIVGALIQSVKKLSDVMILTVF |
| | | CLSVFALIGLQLFMGNLKHKCVRNSLENNETLESIM |
| | | NTLESEEDFRKYFYYLEGSKDALLCGFSTDSGQCPE |
| | | GYTCVKIGRNPDYGYTSFDTFSWAFLALFRLMTQD |
| | | YWENLYQQTLRAAGKTYMIFFVVVIFLGSFYLINLI |
| | | LAVVAMAYEEQNQANIEEAKQKELEFQQMLDRLK |
| | | KEQEEAEAIAAAAAEYTSIRRSRIMGLSESSSETSKL |
| | | SSKSAKERRNRRKKKNQKKLSSGEEKGDAEKLSKS |
| | | ESEDSIRRKSFHLGVEGHRRAHEKRLSTPNQSPLSIR |
| | | GSLFSARRSSRTSLFSFKGRGRDIGSETEFADDEHSI |
| | | FGDNESRRGSLFVPHRPQERRSSNISQASRSPPMLP |
| | | VNGKMHSAVDCNGVVSLVDGRSALMLPNGQLLPE |
| | | GTTNQIHKKRRCSSYLLSEDMLNDPNLRQRAMSRA |
| | | SILTNTVEELEESRQKCPPWWYRFAHKFLIWNCSPY |
| | | WIKFKKCIYFIVMDPFVDLAITICIVLNTLFMAMEH |
| | | HPMTEEFKNVLAIGNLVFTGIFAAEMVLKLIAMDP |
| | | YEYFQVGWNIFDSLIVTLSLVELFLADVEGLSVLRS |
| | | FRLLRVFKLAKSWPTLNMLIKIIGNSVGALGNLTLV |
| | | LAIIVFIFAVVGMQLFGKSYKECVCKINDDCTLPRW |
| | | HMNDFFHSFLIVFRVLCGEWIETMWDCMEVAGQA |
| | | MCLIVYMMVMVIGNLVVLNLFLALLLSSFSSDNLT |
| | | AIEEDPDANNLQIAVTRIKKGINYVKQTLREFILKAF |
| | | SKKPKISREIRQAEDLNTKKENYISNHTLAEMSKGH |
| | | NFLKEKDKISGFGSSVDKHLMEDSDGQSFIHNPSLT |
| | | VTVPIAPGESDLENMNAEELSSDSDSEYSKVRLNRS |
| | | SSSECSTVDNPLPGEGEEAEAEPMNSDEPEACFTDG |
| | | CVRRFSCCQVNIESGKGKIWWNIRKTCYKIVEHSW |
| | | FESFIVLMILLSSGALAFEDIYIERKKTIKIILEYADKI |
| | | FTYIFILEMLLKWIAYGYKTYFTNAWCWLDFLIVD |
| | | VSLVTLVANTLGYSDLGPIKSLRTLRALRPLRALSR |
| | | FEGMRVVVNALIGAIPSIMNVLLVCLIFWLIFSIMGV |
| | | NLFAGKFYECINTTDGSRFPASQVPNRSECFALMN |
| | | VSQNVRWKNLKVNFDNVGLGYLSLLQVATFKGW |
| | | TIIMYAAVDSVNVDKQPKYEYSLYMYIYFVVFIIFG |
| | | SFFTLNLFIGVIIDNFNQQKKKLGGQDIFMTEEQKK |
| | | YYNAMKKLGSKKPQKPIPRPGNKIQGCIFDLVTNQ |
| | | AFDISIMVLICLNMVTMMVEKEGQSQHMTEVLYWI |
| | | NVVFIILFTGECVLKLISLRHYYFTVGWNIFDFVVVI |
| | | ISIVGMFLADLIETYFVSPTLFRVIRLARIGRILRLVK |
| | | GAKGIRTLLFALMMSLPALFNIGLLLFLVMFIYAIFG |
| | | MSNFAYVKKEDGINDMFNFETFGNSMICLFQITTSA |
| | | GWDGLLAPILNSKPPDCDPKKVHPGSSVEGDCGNP |
| | | SVGIFYFVSYIIISFLVVVNMYIAVILENFSVATEEST |
| | | EPLSEDDFEMFYEVWEKFDPDATQFIEFSKLSDFAA |
| | | ALDPPLLIAKPNKVQLIAMDLPMVSGDRIHCLDILF |
| | | AFTKRVLGESGEMDSLRSQMEERFMSANPSKVSYE |
| | | PITTTLKRKQEDVSATVIQRAYRRYRLRQNVKNISS |
| | | IYIKDGDRDDDLLNKKDMAFDNVNENSSPEKTDAT |
| | | SSTTSPPSYDSVTKPDKEKYEQDRTEKEDKGKDSK |
| | | ESKKENLYFQGDYKDHDGDYKDHDIDYKDDDDK |
| | | HHHHHHHHHHGSGATNFSLLKQAGDVEENPGPMG |
| | | RLLALVVGAALVSSACGGCVEVDSETEAVYGMT |
| | | FKILCISCKRRSETNAETFTEWTFRQKGTEEFVK |
| | | ILRYENEVLQLEEDERFEGRVVWNGSRGTKDLQ |
| | | DLSIFITNVTYNHSGDYECHVYRLLFFENYEHNT |
| | | SVVKKIHIEVVDKANRDMASIVSEIMMYVLIVVL |
| | | TIWLVAEMIYCYKKIAAATETAAQENASEYLAIT |
| | | SESKENCTGVQVAEGSGATNFSLLKQAGDVEENPG |
| | | PMHRDAWLPRPAFSLTGLSLFFSLVPPGRSMEV |
| | | TVPATLNVLNGSDARLPCTFNSCYTVNHKQFSL |
| | | NWTYQECNNCSEEMFLQFRMKIINLKLERFQDR |
| | | VEFSGNPSKYDVSVMLRNVQPEDEGIYNCYIMN |
| | | PPDRHRGHGKIHLQVLMEEPPERDSTVAVIVGA |
| | | SVGGFLAVVILVLMVVKCVRRKKEQKLSTDDLK |
| | | TEEEGKTDGEGNPDDGAKGSGATNFSLLKQAGDV |
| | | EENPGPMPAFNRLFPLASLVLIYWVSVCFPVCVE |
| | | VPSETEAVQGNPMKLRCISCMKREEVEATTVVE |
| | | WFYRPEGGKDFLIYEYRNGHQEVESPFQGRLQ |
| | | WNGSKDLQDVSITVLNVTLNDSGLYTCNVSREF |
| | | EFEAHRPFVKTTRLIPLRVTEEAGEDFTSVVSEI |
| | | MMYILLVFLTLWLLIEMIYCYRKVSKAEEAAQE |
| | | NASDYLAIPSENKENSAVPVEE |
| 6 | huNav1.7(R277Q)- | MAMLPPPGPQSFVHFTKQSLALIEQRIAERKSKEPK |
| | beta1-beta2-beta3 viral | EEKKDDDEEAPKPSSDLEAGKQLPFIYGDIPPGMVS |
| | P2A sequences italics; | EPLEDLDPYYADKKTFIVLNKGKTIFRFNATPALYM |
| | beta1-beta2-beta3 are in | LSPFSPLRRISIKILVHSLFSMLIMCTILTNCIFMTMN |
| | bold | NPPDWTKNVEYTFTGIYTFESLVKILARGFCVGEFT |
| | | FLRDPWNWLDFVVIVFAYLTEFVNLGNVSALRTFR |
| | | VLRALKTISVIPGLKTIVGALIQSVKKLSDVMILTVF |
| | | CLSVFALIGLQLFMGNLKHKCFQNSLENNETLESIM |
| | | NTLESEEDFRKYFYYLEGSKDALLCGFSTDSGQCPE |
| | | GYTCVKIGRNPDYGYTSFDTFSWAFLALFRLMTQD |
| | | YWENLYQQTLRAAGKTYMIFFVVVIFLGSFYLINLI |
| | | LAVVAMAYEEQNQANIEEAKQKELEFQQMLDRLK |
| | | KEQEEAEAIAAAAAEYTSIRRSRIMGLSESSSETSKL |
| | | SSKSAKERRNRRKKKNQKKLSSGEEKGDAEKLSKS |
| | | ESEDSIRRKSFHLGVEGHRRAHEKRLSTPNQSPLSIR |
| | | GSLFSARRSSRTSLFSFKGRGRDIGSETEFADDEHSI |
| | | FGDNESRRGSLFVPHRPQERRSSNISQASRSPPMLP |
| | | VNGKMHSAVDCNGVVSLVDGRSALMLPNGQLLPE |
| | | GTTNQIHKKRRCSSYLLSEDMLNDPNLRQRAMSRA |
| | | SILTNTVEELEESRQKCPPWWYRFAHKFLIWNCSPY |
| | | WIKFKKCIYFIVMDPFVDLAITICIVLNTLFMAMEH |
| | | HPMTEEFKNVLAIGNLVFTGIFAAEMVLKLIAMDP |
| | | YEYFQVGWNIFDSLIVTLSLVELFLADVEGLSVLRS |
| | | FRLLRVFKLAKSWPTLNMLIKIIGNSVGALGNLTLV |
| | | LAIIVFIFAVVGMQLFGKSYKECVCKINDDCTLPRW |
| | | HMNDFFHSFLIVFRVLCGEWIETMWDCMEVAGQA |
| | | MCLIVYMMVMVIGNLVVLNLFLALLLSSFSSDNLT |
| | | AIEEDPDANNLQIAVTRIKKGINYVKQTLREFILKAF |
| | | SKKPKISREIRQAEDLNTKKENYISNHTLAEMSKGH |
| | | NFLKEKDKISGFGSSVDKHLMEDSDGQSFIHNPSLT |
| | | VTVPIAPGESDLENMNAEELSSDSDSEYSKVRLNRS |
| | | SSSECSTVDNPLPGEGEEAEAEPMNSDEPEACFTDG |
| | | CVRRFSCCQVNIESGKGKIWWNIRKTCYKIVEHSW |
| | | FESFIVLMILLSSGALAFEDIYIERKKTIKIILEYADKI |
| | | FTYIFILEMLLKWIAYGYKTYFTNAWCWLDFLIVD |
| | | VSLVTLVANTLGYSDLGPIKSLRTLRALRPLRALSR |
| | | FEGMRVVVNALIGAIPSIMNVLLVCLIFWLIFSIMGV |
| | | NLFAGKFYECINTTDGSRFPASQVPNRSECFALMN |
| | | VSQNVRWKNLKVNFDNVGLGYLSLLQVATFKGW |
| | | TIIMYAAVDSVNVDKQPKYEYSLYMYIYFVVFIIFG |
| | | SFFTLNLFIGVIIDNFNQQKKKLGGQDIFMTEEQKK |
| | | YYNAMKKLGSKKPQKPIPRPGNKIQGCIFDLVTNQ |
| | | AFDISIMVLICLNMVTMMVEKEGQSQHMTEVLYWI |
| | | NVVFIILFTGECVLKLISLRHYYFTVGWNIFDFVVVI |
| | | ISIVGMFLADLIETYFVSPTLFRVIRLARIGRILRLVK |
| | | GAKGIRTLLFALMMSLPALFNIGLLLFLVMFIYAIFG |
| | | MSNFAYVKKEDGINDMFNFETFGNSMICLFQITTSA |
| | | GWDGLLAPILNSKPPDCDPKKVHPGSSVEGDCGNP |
| | | SVGIFYFVSYIIISFLVVVNMYIAVILENFSVATEEST |
| | | EPLSEDDFEMFYEVWEKFDPDATQFIEFSKLSDFAA |
| | | ALDPPLLIAKPNKVQLIAMDLPMVSGDRIHCLDILF |
| | | AFTKRVLGESGEMDSLRSQMEERFMSANPSKVSYE |
| | | PITTTLKRKQEDVSATVIQRAYRRYRLRQNVKNISS |
| | | IYIKDGDRDDDLLNKKDMAFDNVNENSSPEKTDAT |
| | | SSTTSPPSYDSVTKPDKEKYEQDRTEKEDKGKDSK |
| | | ESKKENLYFQGDYKDHDGDYKDHDIDYKDDDDK |
| | | HHHHHHHHHHGSGATNFSLLKQAGDVEENPGPMG |
| | | RLLALVVGAALVSSACGGCVEVDSETEAVYGMT |
| | | FKILCISCKRRSETNAETFTEWTFRQKGTEEFVK |
| | | ILRYENEVLQLEEDERFEGRVVWNGSRGTKDLQ |
| | | DLSIFITNVTYNHSGDYECHVYRLLFFENYEHNT |
| | | SVVKKIHIEVVDKANRDMASIVSEIMMYVLIVVL |
| | | TIWLVAEMIYCYKKIAAATETAAQENASEYLAIT |
| | | SESKENCTGVQVAEGSGATNFSLLKQAGDVEENPG |
| | | PMHRDAWLPRPAFSLTGLSLFFSLVPPGRSMEV |
| | | TVPATLNVLNGSDARLPCTFNSCYTVNHKQFSL |
| | | NWTYQECNNCSEEMFLQFRMKIINLKLERFQDR |
| | | VEFSGNPSKYDVSVMLRNVQPEDEGIYNCYIMN |
| | | PPDRHRGHGKIHLQVLMEEPPERDSTVAVIVGA |
| | | SVGGFLAVVILVLMVVKCVRRKKEQKLSTDDLK |
| | | TEEEGKTDGEGNPDDGAKGSGATNFSLLKQAGDV |
| | | EENPGPMPAFNRLFPLASLVLIYWVSVCFPVCVE |
| | | VPSETEAVQGNPMKLRCISCMKREEVEATTVVE |
| | | WFYRPEGGKDFLIYEYRNGHQEVESPFQGRLQ |
| | | WNGSKDLQDVSITVLNVTLNDSGLYTCNVSREF |
| | | EFEAHRPFVKTTRLIPLRVTEEAGEDFTSVVSEI |
| | | MMYILLVFLTLWLLIEMIYCYRKVSKAEEAAQE |
| | | NASDYLAIPSENKENSAVPVEE |
| 7 | huNav1.7(E281V)- | MAMLPPPGPQSFVHFTKQSLALIEQRIAERKSKEPK |
| | beta1-beta2-beta3 | EEKKDDDEEAPKPSSDLEAGKQLPFIYGDIPPGMVS |
| | viral P2A sequences | EPLEDLDPYYADKKTFIVLNKGKTIFRFNATPALYM |
| | italics; beta1-beta2- | LSPFSPLRRISIKILVHSLFSMLIMCTILTNCIFMTMN |
| | beta3 are in bold | NPPDWTKNVEYTFTGIYTFESLVKILARGFCVGEFT |
| | | FLRDPWNWLDFVVIVFAYLTEFVNLGNVSALRTFR |
| | | VLRALKTISVIPGLKTIVGALIQSVKKLSDVMILTVF |
| | | CLSVFALIGLQLFMGNLKHKCFRNSLVNNETLESIM |
| | | NTLESEEDFRKYFYYLEGSKDALLCGFSTDSGQCPE |
| | | GYTCVKIGRNPDYGYTSFDTFSWAFLALFRLMTQD |
| | | YWENLYQQTLRAAGKTYMIFFVVVIFLGSFYLINLI |
| | | LAVVAMAYEEQNQANIEEAKQKELEFQQMLDRLK |
| | | KEQEEAEAIAAAAAEYTSIRRSRIMGLSESSSETSKL |
| | | SSKSAKERRNRRKKKNQKKLSSGEEKGDAEKLSKS |
| | | ESEDSIRRKSFHLGVEGHRRAHEKRLSTPNQSPLSIR |
| | | GSLFSARRSSRTSLFSFKGRGRDIGSETEFADDEHSI |
| | | FGDNESRRGSLFVPHRPQERRSSNISQASRSPPMLP |
| | | VNGKMHSAVDCNGVVSLVDGRSALMLPNGQLLPE |
| | | GTTNQIHKKRRCSSYLLSEDMLNDPNLRQRAMSRA |
| | | SILTNTVEELEESRQKCPPWWYRFAHKFLIWNCSPY |
| | | WIKFKKCIYFIVMDPFVDLAITICIVLNTLFMAMEH |
| | | HPMTEEFKNVLAIGNLVFTGIFAAEMVLKLIAMDP |
| | | YEYFQVGWNIFDSLIVTLSLVELFLADVEGLSVLRS |
| | | FRLLRVFKLAKSWPTLNMLIKIIGNSVGALGNLTLV |
| | | LAIIVFIFAVVGMQLFGKSYKECVCKINDDCTLPRW |
| | | HMNDFFHSFLIVFRVLCGEWIETMWDCMEVAGQA |
| | | MCLIVYMMVMVIGNLVVLNLFLALLLSSFSSDNLT |
| | | AIEEDPDANNLQIAVTRIKKGINYVKQTLREFILKAF |
| | | SKKPKISREIRQAEDLNTKKENYISNHTLAEMSKGH |
| | | NFLKEKDKISGFGSSVDKHLMEDSDGQSFIHNPSLT |
| | | VTVPIAPGESDLENMNAEELSSDSDSEYSKVRLNRS |
| | | SSSECSTVDNPLPGEGEEAEAEPMNSDEPEACFTDG |
| | | CVRRFSCCQVNIESGKGKIWWNIRKTCYKIVEHSW |
| | | FESFIVLMILLSSGALAFEDIYIERKKTIKIILEYADKI |
| | | FTYIFILEMLLKWIAYGYKTYFTNAWCWLDFLIVD |
| | | VSLVTLVANTLGYSDLGPIKSLRTLRALRPLRALSR |
| | | FEGMRVVVNALIGAIPSIMNVLLVCLIFWLIFSIMGV |
| | | NLFAGKFYECINTTDGSRFPASQVPNRSECFALMN |
| | | VSQNVRWKNLKVNFDNVGLGYLSLLQVATFKGW |
| | | TIIMYAAVDSVNVDKQPKYEYSLYMYIYFVVFIIFG |
| | | SFFTLNLFIGVIIDNFNQQKKKLGGQDIFMTEEQKK |
| | | YYNAMKKLGSKKPQKPIPRPGNKIQGCIFDLVTNQ |
| | | AFDISIMVLICLNMVTMMVEKEGQSQHMTEVLYWI |
| | | NVVFIILFTGECVLKLISLRHYYFTVGWNIFDFVVVI |
| | | ISIVGMFLADLIETYFVSPTLFRVIRLARIGRILRLVK |
| | | GAKGIRTLLFALMMSLPALFNIGLLLFLVMFIYAIFG |
| | | MSNFAYVKKEDGINDMFNFETFGNSMICLFQITTSA |
| | | GWDGLLAPILNSKPPDCDPKKVHPGSSVEGDCGNP |
| | | SVGIFYFVSYIIISFLVVVNMYIAVILENFSVATEEST |
| | | EPLSEDDFEMFYEVWEKFDPDATQFIEFSKLSDFAA |
| | | ALDPPLLIAKPNKVQLIAMDLPMVSGDRIHCLDILF |
| | | AFTKRVLGESGEMDSLRSQMEERFMSANPSKVSYE |
| | | PITTTLKRKQEDVSATVIQRAYRRYRLRQNVKNISS |
| | | IYIKDGDRDDDLLNKKDMAFDNVNENSSPEKTDAT |
| | | SSTTSPPSYDSVTKPDKEKYEQDRTEKEDKGKDSK |
| | | ESKKENLYFQGDYKDHDGDYKDHDIDYKDDDDK |
| | | HHHHHHHHHHGSGATNFSLLKQAGDVEENPGPMG |
| | | RLLALVVGAALVSSACGGCVEVDSETEAVYGMTF |
| | | KILCISCKRRSETNAETFTEWTFRQKGTEEFVKILRY |
| | | ENEVLQLEEDERFEGRVVWNGSRGTKDLQDLSIFIT |
| | | NVTYNHSGDYECHVYRLLFFENYEHNTSVVKKIHI |
| | | EVVDKANRDMASIVSEIMMYVLIVVLTIWLVAEMI |
| | | YCYKKIAAATETAAQENASEYLAITSESKENCTGV |
| | | QVAEGSGATNFSLLKQAGDVEENPGPMHRDAWLP |
| | | RPAFSLTGLSLFFSLVPPGRSMEVTVPATLNVLN |
| | | GSDARLPCTFNSCYTVNHKQFSLNWTYQECNNC |
| | | SEEMFLQFRMKIINLKLERFQDRVEFSGNPSKYD |
| | | VSVMLRNVQPEDEGIYNCYIMNPPDRHRGHGKI |
| | | HLQVLMEEPPERDSTVAVIVGASVGGFLAVVILV |
| | | LMVVKCVRRKKEQKLSTDDLKTEEEGKTDGEG |
| | | NPDDGAKGSGATNFSLLKQAGDVEENPGPMPAFNR |
| | | LFPLASLVLIYWVSVCFPVCVEVPSETEAVQGNP |
| | | MKLRCISCMKREEVEATTVVEWFYRPEGGKDF |
| | | LIYEYRNGHQEVESPFQGRLQWNGSKDLQDVSI |
| | | TVLNVTLNDSGLYTCNVSREFEFEAHRPFVKTTR |
| | | LIPLRVTEEAGEDFTSVVSEIMMYILLVFLTLWL |
| | | LIEMIYCYRKVSKAEEAAQENASDYLAIPSENKE |
| | | NSAVPVEE |
| 8 | huNav1.7(V331M)- | MAMLPPPGPQSFVHFTKQSLALIEQRIAERKSKEPK |
| | beta1-beta2-beta3 viral | EEKKDDDEEAPKPSSDLEAGKQLPFIYGDIPPGMVS |
| | P2A sequences italics; | EPLEDLDPYYADKKTFIVLNKGKTIFRFNATPALYM |
| | beta1-beta2-beta3 are in | LSPFSPLRRISIKILVHSLFSMLIMCTILTNCIFMTMN |
| | bold | NPPDWTKNVEYTFTGIYTFESLVKILARGFCVGEFT |
| | | FLRDPWNWLDFVVIVFAYLTEFVNLGNVSALRTFR |
| | | VLRALKTISVIPGLKTIVGALIQSVKKLSDVMILTVF |
| | | CLSVFALIGLQLFMGNLKHKCFRNSLENNETLESIM |
| | | NTLESEEDFRKYFYYLEGSKDALLCGFSTDSGQCPE |
| | | GYTCMKIGRNPDYGYTSFDTFSWAFLALFRLMTQD |
| | | YWENLYQQTLRAAGKTYMIFFVVVIFLGSFYLINLI |
| | | LAVVAMAYEEQNQANIEEAKQKELEFQQMLDRLK |
| | | KEQEEAEAIAAAAAEYTSIRRSRIMGLSESSSETSKL |
| | | SSKSAKERRNRRKKKNQKKLSSGEEKGDAEKLSKS |
| | | ESEDSIRRKSFHLGVEGHRRAHEKRLSTPNQSPLSIR |
| | | GSLFSARRSSRTSLFSFKGRGRDIGSETEFADDEHSI |
| | | FGDNESRRGSLFVPHRPQERRSSNISQASRSPPMLP |
| | | VNGKMHSAVDCNGVVSLVDGRSALMLPNGQLLPE |
| | | GTTNQIHKKRRCSSYLLSEDMLNDPNLRQRAMSRA |
| | | SILTNTVEELEESRQKCPPWWYRFAHKFLIWNCSPY |
| | | WIKFKKCIYFIVMDPFVDLAITICIVLNTLFMAMEH |
| | | HPMTEEFKNVLAIGNLVFTGIFAAEMVLKLIAMDP |
| | | YEYFQVGWNIFDSLIVTLSLVELFLADVEGLSVLRS |
| | | FRLLRVFKLAKSWPTLNMLIKIIGNSVGALGNLTLV |
| | | LAIIVFIFAVVGMQLFGKSYKECVCKINDDCTLPRW |
| | | HMNDFFHSFLIVFRVLCGEWIETMWDCMEVAGQA |
| | | MCLIVYMMVMVIGNLVVLNLFLALLLSSFSSDNLT |
| | | AIEEDPDANNLQIAVTRIKKGINYVKQTLREFILKAF |
| | | SKKPKISREIRQAEDLNTKKENYISNHTLAEMSKGH |
| | | NFLKEKDKISGFGSSVDKHLMEDSDGQSFIHNPSLT |
| | | VTVPIAPGESDLENMNAEELSSDSDSEYSKVRLNRS |
| | | SSSECSTVDNPLPGEGEEAEAEPMNSDEPEACFTDG |
| | | CVRRFSCCQVNIESGKGKIWWNIRKTCYKIVEHSW |
| | | FESFIVLMILLSSGALAFEDIYIERKKTIKIILEYADKI |
| | | FTYIFILEMLLKWIAYGYKTYFTNAWCWLDFLIVD |
| | | VSLVTLVANTLGYSDLGPIKSLRTLRALRPLRALSR |
| | | FEGMRVVVNALIGAIPSIMNVLLVCLIFWLIFSIMGV |
| | | NLFAGKFYECINTTDGSRFPASQVPNRSECFALMN |
| | | VSQNVRWKNLKVNFDNVGLGYLSLLQVATFKGW |
| | | TIIMYAAVDSVNVDKQPKYEYSLYMYIYFVVFIIFG |
| | | SFFTLNLFIGVIIDNFNQQKKKLGGQDIFMTEEQKK |
| | | YYNAMKKLGSKKPQKPIPRPGNKIQGCIFDLVTNQ |
| | | AFDISIMVLICLNMVTMMVEKEGQSQHMTEVLYWI |
| | | NVVFIILFTGECVLKLISLRHYYFTVGWNIFDFVVVI |
| | | ISIVGMFLADLIETYFVSPTLFRVIRLARIGRILRLVK |
| | | GAKGIRTLLFALMMSLPALFNIGLLLFLVMFIYAIFG |
| | | MSNFAYVKKEDGINDMFNFETFGNSMICLFQITTSA |
| | | GWDGLLAPILNSKPPDCDPKKVHPGSSVEGDCGNP |
| | | SVGIFYFVSYIIISFLVVVNMYIAVILENFSVATEEST |
| | | EPLSEDDFEMFYEVWEKFDPDATQFIEFSKLSDFAA |
| | | ALDPPLLIAKPNKVQLIAMDLPMVSGDRIHCLDILF |
| | | AFTKRVLGESGEMDSLRSQMEERFMSANPSKVSYE |
| | | PITTTLKRKQEDVSATVIQRAYRRYRLRQNVKNISS |
| | | IYIKDGDRDDDLLNKKDMAFDNVNENSSPEKTDAT |
| | | SSTTSPPSYDSVTKPDKEKYEQDRTEKEDKGKDSK |
| | | ESKKENLYFQGDYKDHDGDYKDHDIDYKDDDDK |
| | | HHHHHHHHHHGSGATNFSLLKQAGDVEENPGPMG |
| | | RLLALVVGAALVSSACGGCVEVDSETEAVYGMT |
| | | FKILCISCKRRSETNAETFTEWTFRQKGTEEFVK |
| | | ILRYENEVLQLEEDERFEGRVVWNGSRGTKDLQ |
| | | DLSIFITNVTYNHSGDYECHVYRLLFFENYEHNT |
| | | SVVKKIHIEVVDKANRDMASIVSEIMMYVLIVVL |
| | | TIWLVAEMIYCYKKIAAATETAAQENASEYLAIT |
| | | SESKENCTGVQVAEGSGATNFSLLKQAGDVEENPG |
| | | PMHRDAWLPRPAFSLTGLSLFFSLVPPGRSMEV |
| | | TVPATLNVLNGSDARLPCTFNSCYTVNHKQFSL |
| | | NWTYQECNNCSEEMFLQFRMKIINLKLERFQDR |
| | | VEFSGNPSKYDVSVMLRNVQPEDEGIYNCYIMN |
| | | PPDRHRGHGKIHLQVLMEEPPERDSTVAVIVGA |
| | | SVGGFLAVVILVLMVVKCVRRKKEQKLSTDDLK |
| | | TEEEGKTDGEGNPDDGAKGSGATNFSLLKQAGDV |
| | | EENPGPMPAFNRLFPLASLVLIYWVSVCFPVCVE |
| | | VPSETEAVQGNPMKLRCISCMKREEVEATTVVE |
| | | WFYRPEGGKDFLIYEYRNGHQEVESPFQGRLQ |
| | | WNGSKDLQDVSITVLNVTLNDSGLYTCNVSREF |
| | | EFEAHRPFVKTTRLIPLRVTEEAGEDFTSVVSEI |
| | | MMYILLVFLTLWLLIEMIYCYRKVSKAEEAAQE |
| | | NASDYLAIPSENKENSAVPVEE |
| 9 | huNav1.7(N146S, V194I, | MAMLPPPGPQSFVHFTKQSLALIEQRIAERKSKEPK |
| | F276V, R277Q, E281V, | EEKKDDDEEAPKPSSDLEAGKQLPFIYGDIPPGMVS |
| | V331M, E504D, D507E, | EPLEDLDPYYADKKTFIVLNKGKTIFRFNATPALYM |
| | S508N, N533S)-beta1- | LSPFSPLRRISIKILVHSLFSMLIMCTILTNCIFMTMS |
| | beta2-beta3 viral P2A | NPPDWTKNVEYTFTGIYTFESLVKILARGFCVGEFT |
| | sequences italics; beta1- | FLRDPWNWLDFIVIVFAYLTEFVNLGNVSALRTFR |
| | beta2-beta3 are in bold | VLRALKTISVIPGLKTIVGALIQSVKKLSDVMILTVF |
| | | CLSVFALIGLQLFMGNLKHKCVQNSLVNNETLESI |
| | | MNTLESEEDFRKYFYYLEGSKDALLCGFSTDSGQC |
| | | PEGYTCMKIGRNPDYGYTSFDTFSWAFLALFRLMT |
| | | QDYWENLYQQTLRAAGKTYMIFFVVVIFLGSFYLI |
| | | NLILAVVAMAYEEQNQANIEEAKQKELEFQQMLD |
| | | RLKKEQEEAEAIAAAAAEYTSIRRSRIMGLSESSSET |
| | | SKLSSKSAKERRNRRKKKNQKKLSSGEEKGDAEKL |
| | | SKSDSEENIRRKSFHLGVEGHRRAHEKRLSTPSQSP |
| | | LSIRGSLFSARRSSRTSLFSFKGRGRDIGSETEFADD |
| | | EHSIFGDNESRRGSLFVPHRPQERRSSNISQASRSPP |
| | | MLPVNGKMHSAVDCNGVVSLVDGRSALMLPNGQ |
| | | LLPEGTTNQIHKKRRCSSYLLSEDMLNDPNLRQRA |
| | | MSRASILTNTVEELEESRQKCPPWWYRFAHKFLIW |
| | | NCSPYWIKFKKCIYFIVMDPFVDLAITICIVLNTLFM |
| | | AMEHHPMTEEFKNVLAIGNLVFTGIFAAEMVLKLI |
| | | AMDPYEYFQVGWNIFDSLIVTLSLVELFLADVEGLS |
| | | VLRSFRLLRVFKLAKSWPTLNMLIKIIGNSVGALGN |
| | | LTLVLAIIVFIFAVVGMQLFGKSYKECVCKINDDCT |
| | | LPRWHMNDFFHSFLIVFRVLCGEWIETMWDCMEV |
| | | AGQAMCLIVYMMVMVIGNLVVLNLFLALLLSSFSS |
| | | DNLTAIEEDPDANNLQIAVTRIKKGINYVKQTLREFI |
| | | LKAFSKKPKISREIRQAEDLNTKKENYISNHTLAEM |
| | | SKGHNFLKEKDKISGFGSSVDKHLMEDSDGQSFIH |
| | | NPSLTVTVPIAPGESDLENMNAEELSSDSDSEYSKV |
| | | RLNRSSSSECSTVDNPLPGEGEEAEAEPMNSDEPEA |
| | | CFTDGCVRRFSCCQVNIESGKGKIWWNIRKTCYKI |
| | | VEHSWFESFIVLMILLSSGALAFEDIYIERKKTIKIIL |
| | | EYADKIFTYIFILEMLLKWIAYGYKTYFTNAWCWL |
| | | DFLIVDVSLVTLVANTLGYSDLGPIKSLRTLRALRP |
| | | LRALSRFEGMRVVVNALIGAIPSIMNVLLVCLIFWL |
| | | IFSIMGVNLFAGKFYECINTTDGSRFPASQVPNRSEC |
| | | FALMNVSQNVRWKNLKVNFDNVGLGYLSLLQVA |
| | | TFKGWTIIMYAAVDSVNVDKQPKYEYSLYMYIYF |
| | | VVFIIFGSFFTLNLFIGVIIDNFNQQKKKLGGQDIFM |
| | | TEEQKKYYNAMKKLGSKKPQKPIPRPGNKIQGCIF |
| | | DLVTNQAFDISIMVLICLNMVTMMVEKEGQSQHM |
| | | TEVLYWINVVFIILFTGECVLKLISLRHYYFTVGWNI |
| | | FDFVVVIISIVGMFLADLIETYFVSPTLFRVIRLARIG |
| | | RILRLVKGAKGIRTLLFALMMSLPALFNIGLLLFLV |
| | | MFIYAIFGMSNFAYVKKEDGINDMFNFETFGNSMI |
| | | CLFQITTSAGWDGLLAPILNSKPPDCDPKKVHPGSS |
| | | VEGDCGNPSVGIFYFVSYIIISFLVVVNMYIAVILEN |
| | | FSVATEESTEPLSEDDFEMFYEVWEKFDPDATQFIE |
| | | FSKLSDFAAALDPPLLIAKPNKVQLIAMDLPMVSG |
| | | DRIHCLDILFAFTKRVLGESGEMDSLRSQMEERFMS |
| | | ANPSKVSYEPITTTLKRKQEDVSATVIQRAYRRYRL |
| | | RQNVKNISSIYIKDGDRDDDLLNKKDMAFDNVNEN |
| | | SSPEKTDATSSTTSPPSYDSVTKPDKEKYEQDRTEK |
| | | EDKGKDSKESKKSGRGSGATNFSLLKQAGDVEENPG |
| | | PMGRLLALVVGAALVSSACGGCVEVDSETEAVY |
| | | GMTFKILCISCKRRSETNAETFTEWTFRQKGTE |
| | | EFVKILRYENEVLQLEEDERFEGRVVWNGSRGT |
| | | KDLQDLSIFITNVTYNHSGDYECHVYRLLFFENY |
| | | EHNTSVVKKIHIEVVDKANRDMASIVSEIMMYV |
| | | LIVVLTIWLVAEMIYCYKKIAAATETAAQENASE |
| | | YLAITSESKENCTGVQVAEGSGATNFSLLKQAGDV |
| | | EENPGPMHRDAWLPRPAFSLTGLSLFFSLVPPGR |
| | | SMEVTVPATLNVLNGSDARLPCTFNSCYTVNHK |
| | | QFSLNWTYQECNNCSEEMFLQFRMKIINLKLER |
| | | FQDRVEFSGNPSKYDVSVMLRNVQPEDEGIYNC |
| | | YIMNPPDRHRGHGKIHLQVLMEEPPERDSTVAV |
| | | IVGASVGGFLAVVILVLMVVKCVRRKKEQKLST |
| | | DDLKTEEEGKTDGEGNPDDGAKGSGATNFSLLK |
| | | QAGDVEENPGPMPAFNRLFPLASLVLIYWVSVCF |
| | | PVCVEVPSETEAVQGNPMKLRCISCMKREEVEA |
| | | TTVVEWFYRPEGGKDFLIYEYRNGHQEVESPFQ |
| | | GRLQWNGSKDLQDVSITVLNVTLNDSGLYTCNV |
| | | SREFEFEAHRPFVKTTRLIPLRVTEEAGEDFTSV |
| | | VSEIMMYILLVFLTLWLLIEMIYCYRKVSKAEEA |
| | | AQENASDYLAIPSENKENSAVPVEE |
| 10 | huNav157 chimera 1 | MAMLPPPGPQSFVHFTKQSLALIEQRIAERKSKEPK |
| | | EEKKDDDEEAPKPSSDLEAGKQLPFIYGDIPPGMVS |
| | | EPLEDLDPYYADKKTFIVLNKGKTIFRFNATPALYM |
| | | LSPFSPLRRISIKILVHSLFSMLIMCTILTNCIFMTMN |
| | | NPPDWTKNVEYTFTGIYTFESLVKILARGFCVGEFT |
| | | FLRDPWNWLDFVVIVFAYLTEFVNLGNVSALRTFR |
| | | VLRALKTISVIPGLKTIVGALIQSVKKLSDVMILTVF |
| | | CLSVFALIGLQLFMGNLKHKCFRNSLENNETLESIM |
| | | NTLESEEDFRKYFYYLEGSKDALLCGFSTDSGQCPE |
| | | GYTCVKIGRNPDYGYTSFDTFSWAFLALFRLMTQD |
| | | YWENLYQQTLRAAGKTYMIFFVVVIFLGSFYLINLI |
| | | LAVVAMAYEEQNQANIEEAKQKELEFQQMLDRLK |
| | | KEQEEAEAIAAAAAEYTSIRRSRIMGLSESSSETSKL |
| | | SSKSAKERRNRRKKKNQKKLSSGEEKGDAEKLSKS |
| | | ESEDSIRRKSFHLGVEGHRRAHEKRLSTPNQSPLSIR |
| | | GSLFSARRSSRTSLFSFKGRGRDIGSETEFADDEHSI |
| | | FGDNESRRGSLFVPHRPQERRSSNISQASRSPPMLP |
| | | VNGKMHSAVDCNGVVSLVDGRSALMLPNGQLLPE |
| | | GTTNQIHKKRRCSSYLLSEDMLNDPNLRQRAMSRA |
| | | SILTNTVEELEESRQKCPPWWYRFAHKFLIWNCSPY |
| | | WIKFKKCIYFIVMDPFVDLAITICIVLNTLFMAMEH |
| | | HPMTEEFKNVLAIGNLVFTGIFAAEMVLKLIAMDP |
| | | YEYFQVGWNIFDSLIVTLSLVELFLADVEGLSVLRS |
| | | FRLLRVFKLAKSWPTLNMLIKIIGNSVGALGNLTLV |
| | | LAIIVFIFAVVGMQLFGKSYKECVCKINDDCTLPRW |
| | | HMNDFFHSFLIVFRVLCGEWIETMWDCMEVAGQA |
| | | MCLIVYMMVMVIGNLVVLNLFLALLLSSFSSDNLT |
| | | AIEEDPDANNLQIAVTRIKKGINYVKQTLREFILKAF |
| | | SKKPKISREIRQAEDLNTKKENYISNHTLAEMSKGH |
| | | NFLKEKDKISGFGSSVDKHLMEDSDGQSFIHNPSLT |
| | | VTVPIAPGESDLENMNAEELSSDSDSEYSKVRLNRS |
| | | SSSECSTVDNPLPGEGEEAEAEPMNSDEPEACFTDG |
| | | CVRRFSCCQVNIESGKGKIWWNIRKTCYKIVEHSW |
| | | FESFIVLMILLSSGALAFEDIYIERKKTIKIILEYADKI |
| | | FTYIFILEMLLKWIAYGYKTYFTNAWCWLDFLIVD |
| | | VSLVTLVANTLGYSDLGPIKSLRTLRALRPLRALSR |
| | | FEGMRVVVNALIGAIPSIMNVLLVCLIFWLIFSIMGV |
| | | NLFAGKFYECINTTDGSRFPASQVPNRSECFALMN |
| | | VSQNVRWKNLKVNFDNVGLGYLSLLQVATFKGW |
| | | TIIMYAAVDSVNVDKQPKYEYSLYMYIYFVVFIIFG |
| | | SFFTLNLFIGVIIDNFNQQKKKLGGQDIFMTEEQKK |
| | | YYNAMKKLGSKKPQKPIPRPLNKYQGFIFDIVTKQ |
| | | AFDVTIMFLICLNMVTMMVETDDQSPEKINILAKIN |
| | | LLFVAIFTGECIVKLAALRHYYFTNSWNIFDFVVVI |
| | | LSIVGTVLSDIIQKYFFSPTLFRVIRLARIGRILRLIRG |
| | | AKGIRTLLFALMMSLPALFNIGLLLFLVMFIYSIFGM |
| | | ANFAYVKWEAGIDDMFNFQTFANSMLCLFQITTSA |
| | | GWDGLLSPILNTGPPYCDPTLPNSNGSRGDCGSPAV |
| | | GILFFTTYIIISFLIVVNMYIAIILENFSVATEESTEPLS |
| | | EDDFDMFYEIWEKFDPEATQFIEYSVLSDFADALSE |
| | | PLRIAKPNQISLINMDLPMVSGDRIHCMDILFAFTKR |
| | | VLGESGEMDALKIQMEEKFMAANPSKISYEPITTTL |
| | | RRKHEEVSAMVIQRAFRRHLLQRSLKHASFLFRQQ |
| | | AGSGLSEEDAPEREGLIAYVMSENFSRPLGPPSSSSI |
| | | SSTSFPPSYDSVTRATSDNLQVRGSDYSHSEDLADF |
| | | PPSPDRDRESIV |
| 11 | huNav157 chimera 2 | MAMLPPPGPQSFVHFTKQSLALIEQRIAERKSKEPK |
| | | EEKKDDDEEAPKPSSDLEAGKQLPFIYGDIPPGMVS |
| | | EPLEDLDPYYADKKTFIVLNKGKTIFRFNATPALYM |
| | | LSPFSPLRRISIKILVHSLFSMLIMCTILTNCIFMTMN |
| | | NPPDWTKNVEYTFTGIYTFESLVKILARGFCVGEFT |
| | | FLRDPWNWLDFVVIVFAYLTEFVNLGNVSALRTFR |
| | | VLRALKTISVIPGLKTIVGALIQSVKKLSDVMILTVF |
| | | CLSVFALIGLQLFMGNLKHKCFRNSLENNETLESIM |
| | | NTLESEEDFRKYFYYLEGSKDALLCGFSTDSGQCPE |
| | | GYTCVKIGRNPDYGYTSFDTFSWAFLALFRLMTQD |
| | | YWENLYQQTLRAAGKTYMIFFVVVIFLGSFYLINLI |
| | | LAVVAMAYEEQNQANIEEAKQKELEFQQMLDRLK |
| | | KEQEEAEAIAAAAAEYTSIRRSRIMGLSESSSETSKL |
| | | SSKSAKERRNRRKKKNQKKLSSGEEKGDAEKLSKS |
| | | ESEDSIRRKSFHLGVEGHRRAHEKRLSTPNQSPLSIR |
| | | GSLFSARRSSRTSLFSFKGRGRDIGSETEFADDEHSI |
| | | FGDNESRRGSLFVPHRPQERRSSNISQASRSPPMLP |
| | | VNGKMHSAVDCNGVVSLVDGRSALMLPNGQLLPE |
| | | GTTNQIHKKRRCSSYLLSEDMLNDPNLRQRAMSRA |
| | | SILTNTVEELEESRQKCPPWWYRFAHKFLIWNCSPY |
| | | WIKFKKCIYFIVMDPFVDLAITICIVLNTLFMAMEH |
| | | HPMTEEFKNVLAIGNLVFTGIFAAEMVLKLIAMDP |
| | | YEYFQVGWNIFDSLIVTLSLVELFLADVEGLSVLRS |
| | | FRLLRVFKLAKSWPTLNMLIKIIGNSVGALGNLTLV |
| | | LAIIVFIFAVVGMQLFGKSYKECVCKINDDCTLPRW |
| | | HMNDFFHSFLIVFRVLCGEWIETMWDCMEVAGQA |
| | | MCLIVYMMVMVIGNLVVLNLFLALLLSSFSADNLT |
| | | APDEDREMNNLQLALARIQRGLRFVKRTTWDFCC |
| | | GLLRQRPQKPAALAAQGQLPSCIATPYSPPPPETEK |
| | | VPPTRKETRFEEGEQPGQGTPGDPEPVCVPIAVAES |
| | | DTDDQEEDEENSLGTEEESSKQESQPVSGGPEAPPD |
| | | SRTWSQVSATASSEAEASASQADWRQQWKAEPQA |
| | | PGCGETPEDSCSEGSTADMINTAELLEQIPDLGQDV |
| | | KDPEDCFTEGCVRRCPCCAVDTTQAPGKVWWRLR |
| | | KTCYHIVEHSWFETFIIFMILLSSGALAFEDIYLEER |
| | | KTIKVLLEYADKMFTYVFVLEMLLKWVAYGFKKY |
| | | FTNAWCWLDFLIVDVSLVSLVANTLGFAEMGPIKS |
| | | LRTLRALRPLRALSRFEGMRVVVNALVGAIPSIMN |
| | | VLLVCLIFWLIFSIMGVNLFAGKFGRCINQTEGDLP |
| | | LNYTIVNNKSQCESLNLTGELYWTKVKVNFDNVG |
| | | AGYLALLQVATFKGWMDIMYAAVDSRGYEEQPQ |
| | | WEYNLYMYIYFVIFIIFGSFFTLNLFIGVIIDNFNQQK |
| | | KKLGGQDIFMTEEQKKYYNAMKKLGSKKPQKPIP |
| | | RPGNKIQGCIFDLVTNQAFDISIMVLICLNMVTMMV |
| | | EKEGQSQHMTEVLYWINVVFIILFTGECVLKLISLR |
| | | HYYFTVGWNIFDFVVVIISIVGMFLADLIETYFVSPT |
| | | LFRVIRLARIGRILRLVKGAKGIRTLLFALMMSLPA |
| | | LFNIGLLLFLVMFIYAIFGMSNFAYVKKEDGINDMF |
| | | NFETFGNSMICLFQITTSAGWDGLLAPILNSKPPDC |
| | | DPKKVHPGSSVEGDCGNPSVGIFYFVSYIIISFLVVV |
| | | NMYIAVILENFSVATEESTEPLSEDDFEMFYEVWEK |
| | | FDPDATQFIEFSKLSDFAAALDPPLLIAKPNKVQLIA |
| | | MDLPMVSGDRIHCLDILFAFTKRVLGESGEMDSLR |
| | | SQMEERFMSANPSKVSYEPITTTLKRKQEDVSATVI |
| | | QRAYRRYRLRQNVKNISSIYIKDGDRDDDLLNKKD |
| | | MAFDNVNENSSPEKTDATSSTTSPPSYDSVTKPDKE |
| | | KYEQDRTEKEDKGKDSKESKK |
| 12 | huNav157 chimera 3 | MAMLPPPGPQSFVHFTKQSLALIEQRIAERKSKEPK |
| | | EEKKDDDEEAPKPSSDLEAGKQLPFIYGDIPPGMVS |
| | | EPLEDLDPYYADKKTFIVLNKGKTIFRFNATPALYM |
| | | LSPFSPLRRISIKILVHSLFSMLIMCTILTNCIFMTMN |
| | | NPPDWTKNVEYTFTGIYTFESLVKILARGFCVGEFT |
| | | FLRDPWNWLDFVVIVFAYLTEFVNLGNVSALRTFR |
| | | VLRALKTISVIPGLKTIVGALIQSVKKLSDVMILTVF |
| | | CLSVFALIGLQLFMGNLKHKCFRNSLENNETLESIM |
| | | NTLESEEDFRKYFYYLEGSKDALLCGFSTDSGQCPE |
| | | GYTCVKIGRNPDYGYTSFDTFSWAFLALFRLMTQD |
| | | YWENLYQQTLRAAGKTYMIFFVVVIFLGSFYLINLI |
| | | LAVVAMAYEEQNQATIAETEEKEKRFQEAMEMLK |
| | | KEHEALTIRGVDTVSRSSLEMSPLAPVNSHERRSKR |
| | | RKRMSSGTEECGEDRLPKSDSEDGPRAMNHLSLTR |
| | | GLSRTSMKPRSSRGSIFTFRRRDLGSEADFADDENS |
| | | TAGESESHHTSLLVPWPLRRTSAQGQPSPGTSAPGH |
| | | ALHGKKNSTVDCNGVVSLLGAGDPEATSPGSHLLR |
| | | PVMLEHPPDTTTPSEEPGGPQMLTSQAPCVDGFEEP |
| | | GARQRALSAVSVLTSALEELEESRHKCPPCWNRLA |
| | | QRYLIWECCPLWMSIKQGVKLVVMDPFTDLTITMC |
| | | IVLNTLFMALEHYNMTSEFEEMLQVGNLVFTGIFT |
| | | AEMTFKIIALDPYYYFQQGWNIFDSIIVILSLMELGL |
| | | SRMSNLSVLRSFRLLRVFKLAKSWPTLNTLIKIIGNS |
| | | VGALGNLTLVLAIIVFIFAVVGMQLFGKNYSELRDS |
| | | DSGLLPRWHMMDFFHAFLIIFRILCGEWIETMWDC |
| | | MEVSGQSLCLLVFLLVMVIGNLVVLNLFLALLLSSF |
| | | SSDNLTAIEEDPDANNLQIAVTRIKKGINYVKQTLR |
| | | EFILKAFSKKPKISREIRQAEDLNTKKENYISNHTLA |
| | | EMSKGHNFLKEKDKISGFGSSVDKHLMEDSDGQSF |
| | | IHNPSLTVTVPIAPGESDLENMNAEELSSDSDSEYSK |
| | | VRLNRSSSSECSTVDNPLPGEGEEAEAEPMNSDEPE |
| | | ACFTDGCVRRFSCCQVNIESGKGKIWWNIRKTCYK |
| | | IVEHSWFESFIVLMILLSSGALAFEDIYIERKKTIKIIL |
| | | EYADKIFTYIFILEMLLKWIAYGYKTYFTNAWCWL |
| | | DFLIVDVSLVTLVANTLGYSDLGPIKSLRTLRALRP |
| | | LRALSRFEGMRVVVNALIGAIPSIMNVLLVCLIFWL |
| | | IFSIMGVNLFAGKFYECINTTDGSRFPASQVPNRSEC |
| | | FALMNVSQNVRWKNLKVNFDNVGLGYLSLLQVA |
| | | TFKGWTIIMYAAVDSVNVDKQPKYEYSLYMYIYF |
| | | VVFIIFGSFFTLNLFIGVIIDNFNQQKKKLGGQDIFM |
| | | TEEQKKYYNAMKKLGSKKPQKPIPRPGNKIQGCIF |
| | | DLVTNQAFDISIMVLICLNMVTMMVEKEGQSQHM |
| | | TEVLYWINVVFIILFTGECVLKLISLRHYYFTVGWNI |
| | | FDFVVVIISIVGMFLADLIETYFVSPTLFRVIRLARIG |
| | | RILRLVKGAKGIRTLLFALMMSLPALFNIGLLLFLV |
| | | MFIYAIFGMSNFAYVKKEDGINDMFNFETFGNSMI |
| | | CLFQITTSAGWDGLLAPILNSKPPDCDPKKVHPGSS |
| | | VEGDCGNPSVGIFYFVSYIIISFLVVVNMYIAVILEN |
| | | FSVATEESTEPLSEDDFEMFYEVWEKFDPDATQFIE |
| | | FSKLSDFAAALDPPLLIAKPNKVQLIAMDLPMVSG |
| | | DRIHCLDILFAFTKRVLGESGEMDSLRSQMEERFMS |
| | | ANPSKVSYEPITTTLKRKQEDVSATVIQRAYRRYRL |
| | | RQNVKNISSIYIKDGDRDDDLLNKKDMAFDNVNEN |
| | | SSPEKTDATSSTTSPPSYDSVTKPDKEKYEQDRTEK |
| | | EDKGKDSKESKK |
| 13 | huNav157 chimera 4 | MANFLLPRGTSSFRRFTRESLAAIEKRMAEKQARG |
| | | STTLQESREGLPEEEAPRPQLDLQASKKLPDLYGNP |
| | | PQELIGEPLEDLDPFYSTQKTFIVLNKGKTIFRFSAT |
| | | NALYVLSPFHPIRRAAVKILVHSLFNMLIMCTILTN |
| | | CVFMAQHDPPPWTKYVEYTFTAIYTFESLVKILAR |
| | | GFCLHAFTFLRDPWNWLDFSVIIMAYTTEFVDLGN |
| | | VSALRTFRVLRALKTISVISGLKTIVGALIQSVKKLA |
| | | DVMVLTVFCLSVFALIGLQLFMGNLRHKCVRNFTA |
| | | LNGTNGSVEADGLVWESLDLYLSDPENYLLKNGTS |
| | | DVLLCGNSSDAGTCPEGYRCLKAGENPDHGYTSFD |
| | | SFAWAFLALFRLMTQDCWERLYQQTLRSAGKIYMI |
| | | FFMLVIFLGSFYLVNLILAVVAMAYEEQNQANIEEA |
| | | KQKELEFQQMLDRLKKEQEEAEAIAAAAAEYTSIR |
| | | RSRIMGLSESSSETSKLSSKSAKERRNRRKKKNQKK |
| | | LSSGEEKGDAEKLSKSESEDSIRRKSFHLGVEGHRR |
| | | AHEKRLSTPNQSPLSIRGSLFSARRSSRTSLFSFKGR |
| | | GRDIGSETEFADDEHSIFGDNESRRGSLFVPHRPQE |
| | | RRSSNISQASRSPPMLPVNGKMHSAVDCNGVVSLV |
| | | DGRSALMLPNGQLLPEGTTNQIHKKRRCSSYLLSE |
| | | DMLNDPNLRQRAMSRASILTNTVEELEESRQKCPP |
| | | WWYRFAHKFLIWNCSPYWIKFKKCIYFIVMDPFVD |
| | | LAITICIVLNTLFMAMEHHPMTEEFKNVLAIGNLVF |
| | | TGIFAAEMVLKLIAMDPYEYFQVGWNIFDSLIVTLS |
| | | LVELFLADVEGLSVLRSFRLLRVFKLAKSWPTLNM |
| | | LIKIIGNSVGALGNLTLVLAIIVFIFAVVGMQLFGKS |
| | | YKECVCKINDDCTLPRWHMNDFFHSFLIVFRVLCG |
| | | EWIETMWDCMEVAGQAMCLIVYMMVMVIGNLVV |
| | | LNLFLALLLSSFSSDNLTAIEEDPDANNLQIAVTRIK |
| | | KGINYVKQTLREFILKAFSKKPKISREIRQAEDLNTK |
| | | KENYISNHTLAEMSKGHNFLKEKDKISGFGSSVDK |
| | | HLMEDSDGQSFIHNPSLTVTVPIAPGESDLENMNAE |
| | | ELSSDSDSEYSKVRLNRSSSSECSTVDNPLPGEGEE |
| | | AEAEPMNSDEPEACFTDGCVRRFSCCQVNIESGKG |
| | | KIWWNIRKTCYKIVEHSWFESFIVLMILLSSGALAF |
| | | EDIYIERKKTIKIILEYADKIFTYIFILEMLLKWIAYG |
| | | YKTYFTNAWCWLDFLIVDVSLVTLVANTLGYSDL |
| | | GPIKSLRTLRALRPLRALSRFEGMRVVVNALIGAIPS |
| | | IMNVLLVCLIFWLIFSIMGVNLFAGKFYECINTTDGS |
| | | RFPASQVPNRSECFALMNVSQNVRWKNLKVNFDN |
| | | VGLGYLSLLQVATFKGWTIIMYAAVDSVNVDKQP |
| | | KYEYSLYMYIYFVVFIIFGSFFTLNLFIGVIIDNFNQQ |
| | | KKKLGGQDIFMTEEQKKYYNAMKKLGSKKPQKPI |
| | | PRPGNKIQGCIFDLVTNQAFDISIMVLICLNMVTMM |
| | | VEKEGQSQHMTEVLYWINVVFIILFTGECVLKLISL |
| | | RHYYFTVGWNIFDFVVVIISIVGMFLADLIETYFVSP |
| | | TLFRVIRLARIGRILRLVKGAKGIRTLLFALMMSLP |
| | | ALFNIGLLLFLVMFIYAIFGMSNFAYVKKEDGINDM |
| | | FNFETFGNSMICLFQITTSAGWDGLLAPILNSKPPDC |
| | | DPKKVHPGSSVEGDCGNPSVGIFYFVSYIIISFLVVV |
| | | NMYIAVILENFSVATEESTEPLSEDDFEMFYEVWEK |
| | | FDPDATQFIEFSKLSDFAAALDPPLLIAKPNKVQLIA |
| | | MDLPMVSGDRIHCLDILFAFTKRVLGESGEMDSLR |
| | | SQMEERFMSANPSKVSYEPITTTLKRKQEDVSATVI |
| | | QRAYRRYRLRQNVKNISSIYIKDGDRDDDLLNKKD |
| | | MAFDNVNENSSPEKTDATSSTTSPPSYDSVTKPDKE |
| | | KYEQDRTEKEDKGKDSKESKK |
| 14 | huNav157 chimera 5 | MANFLLPRGTSSFRRFTRESLAAIEKRMAEKQARG |
| | | STTLQESREGLPEEEAPRPQLDLQASKKLPDLYGNP |
| | | PQELIGEPLEDLDPFYSTQKTFIVLNKGKTIFRFSAT |
| | | NALYVLSPFHPIRRAAVKILVHSLFNMLIMCTILTN |
| | | CVFMAQHDPPPWTKYVEYTFTAIYTFESLVKILAR |
| | | GFCLHAFTFLRDPWNWLDFSVIIMAYTTEFVDLGN |
| | | VSALRTFRVLRALKTISVISGLKTIVGALIQSVKKLA |
| | | DVMVLTVFCLSVFALIGLQLFMGNLRHKCVRNFTA |
| | | LNGTNGSVEADGLVWESLDLYLSDPENYLLKNGTS |
| | | DVLLCGNSSDAGTCPEGYRCLKAGENPDHGYTSFD |
| | | SFAWAFLALFRLMTQDCWERLYQQTLRSAGKIYMI |
| | | FFMLVIFLGSFYLVNLILAVVAMAYEEQNQATIAET |
| | | EEKEKRFQEAMEMLKKEHEALTIRGVDTVSRSSLE |
| | | MSPLAPVNSHERRSKRRKRMSSGTEECGEDRLPKS |
| | | DSEDGPRAMNHLSLTRGLSRTSMKPRSSRGSIFTFR |
| | | RRDLGSEADFADDENSTAGESESHHTSLLVPWPLR |
| | | RTSAQGQPSPGTSAPGHALHGKKNSTVDCNGVVSL |
| | | LGAGDPEATSPGSHLLRPVMLEHPPDTTTPSEEPGG |
| | | PQMLTSQAPCVDGFEEPGARQRALSAVSVLTSALE |
| | | ELEESRHKCPPCWNRLAQRYLIWECCPLWMSIKQG |
| | | VKLVVMDPFTDLTITMCIVLNTLFMALEHYNMTSE |
| | | FEEMLQVGNLVFTGIFTAEMTFKIIALDPYYYFQQG |
| | | WNIFDSIIVILSLMELGLSRMSNLSVLRSFRLLRVFK |
| | | LAKSWPTLNTLIKIIGNSVGALGNLTLVLAIIVFIFA |
| | | VVGMQLFGKNYSELRDSDSGLLPRWHMMDFFHAF |
| | | LIIFRILCGEWIETMWDCMEVSGQSLCLLVFLLVMV |
| | | IGNLVVLNLFLALLLSSFSADNLTAPDEDREMNNL |
| | | QLALARIQRGLRFVKRTTWDFCCGLLRQRPQKPAA |
| | | LAAQGQLPSCIATPYSPPPPETEKVPPTRKETRFEEG |
| | | EQPGQGTPGDPEPVCVPIAVAESDTDDQEEDEENSL |
| | | GTEEESSKQESQPVSGGPEAPPDSRTWSQVSATASS |
| | | EAEASASQADWRQQWKAEPQAPGCGETPEDSCSE |
| | | GSTADMTNTAELLEQIPDLGQDVKDPEDCFTEGCV |
| | | RRCPCCAVDTTQAPGKVWWRLRKTCYHIVEHSWF |
| | | ETFIIFMILLSSGALAFEDIYLEERKTIKVLLEYADK |
| | | MFTYVFVLEMLLKWVAYGFKKYFTNAWCWLDFL |
| | | IVDVSLVSLVANTLGFAEMGPIKSLRTLRALRPLRA |
| | | LSRFEGMRVVVNALVGAIPSIMNVLLVCLIFWLIFSI |
| | | MGVNLFAGKFGRCINQTEGDLPLNYTIVNNKSQCE |
| | | SLNLTGELYWTKVKVNFDNVGAGYLALLQVATFK |
| | | GWMDIMYAAVDSRGYEEQPQWEYNLYMYIYFVIF |
| | | IIFGSFFTLNLFIGVIIDNFNQQKKKLGGQDIFMTEEQ |
| | | KKYYNAMKKLGSKKPQKPIPRPGNKIQGCIFDLVT |
| | | NQAFDISIMVLICLNMVTMMVEKEGQSQHMTEVL |
| | | YWINVVFIILFTGECVLKLISLRHYYFTVGWNIFDFV |
| | | VVIISIVGMFLADLIETYFVSPTLFRVIRLARIGRILRL |
| | | VKGAKGIRTLLFALMMSLPALFNIGLLLFLVMFIYA |
| | | IFGMSNFAYVKKEDGINDMFNFETFGNSMICLFQIT |
| | | TSAGWDGLLAPILNSKPPDCDPKKVHPGSSVEGDC |
| | | GNPSVGIFYFVSYIIISFLVVVNMYIAVILENFSVATE |
| | | ESTEPLSEDDFEMFYEVWEKFDPDATQFIEFSKLSD |
| | | FAAALDPPLLIAKPNKVQLIAMDLPMVSGDRIHCL |
| | | DILFAFTKRVLGESGEMDSLRSQMEERFMSANPSK |
| | | VSYEPITTTLKRKQEDVSATVIQRAYRRYRLRQNV |
| | | KNISSIYIKDGDRDDDLLNKKDMAFDNVNENSSPE |
| | | KTDATSSTTSPPSYDSVTKPDKEKYEQDRTEKEDK |
| | | GKDSKESKK |
| 15 | huNav157 chimera 6 | MANFLLPRGTSSFRRFTRESLAAIEKRMAEKQARG |
| | | STTLQESREGLPEEEAPRPQLDLQASKKLPDLYGNP |
| | | PQELIGEPLEDLDPFYSTQKTFIVLNKGKTIFRFSAT |
| | | NALYVLSPFHPIRRAAVKILVHSLFNMLIMCTILTN |
| | | CVFMAQHDPPPWTKYVEYTFTAIYTFESLVKILAR |
| | | GFCLHAFTFLRDPWNWLDFSVIIMAYTTEFVDLGN |
| | | VSALRTFRVLRALKTISVISGLKTIVGALIQSVKKLA |
| | | DVMVLTVFCLSVFALIGLQLFMGNLRHKCVRNFTA |
| | | LNGTNGSVEADGLVWESLDLYLSDPENYLLKNGTS |
| | | DVLLCGNSSDAGTCPEGYRCLKAGENPDHGYTSFD |
| | | SFAWAFLALFRLMTQDCWERLYQQTLRSAGKIYMI |
| | | FFMLVIFLGSFYLVNLILAVVAMAYEEQNQATIAET |
| | | EEKEKRFQEAMEMLKKEHEALTIRGVDTVSRSSLE |
| | | MSPLAPVNSHERRSKRRKRMSSGTEECGEDRLPKS |
| | | DSEDGPRAMNHLSLTRGLSRTSMKPRSSRGSIFTFR |
| | | RRDLGSEADFADDENSTAGESESHHTSLLVPWPLR |
| | | RTSAQGQPSPGTSAPGHALHGKKNSTVDCNGVVSL |
| | | LGAGDPEATSPGSHLLRPVMLEHPPDTTTPSEEPGG |
| | | PQMLTSQAPCVDGFEEPGARQRALSAVSVLTSALE |
| | | ELEESRHKCPPCWNRLAQRYLIWECCPLWMSIKQG |
| | | VKLVVMDPFTDLTITMCIVLNTLFMALEHYNMTSE |
| | | FEEMLQVGNLVFTGIFTAEMTFKIIALDPYYYFQQG |
| | | WNIFDSIIVILSLMELGLSRMSNLSVLRSFRLLRVFK |
| | | LAKSWPTLNTLIKIIGNSVGALGNLTLVLAIIVFIFA |
| | | VVGMQLFGKNYSELRDSDSGLLPRWHMMDFFHAF |
| | | LIIFRILCGEWIETMWDCMEVSGQSLCLLVFLLVMV |
| | | IGNLVVLNLFLALLLSSFSSDNLTAIEEDPDANNLQI |
| | | AVTRIKKGINYVKQTLREFILKAFSKKPKISREIRQA |
| | | EDLNTKKENYISNHTLAEMSKGHNFLKEKDKISGF |
| | | GSSVDKHLMEDSDGQSFIHNPSLTVTVPIAPGESDL |
| | | ENMNAEELSSDSDSEYSKVRLNRSSSSECSTVDNPL |
| | | PGEGEEAEAEPMNSDEPEACFTDGCVRRFSCCQVN |
| | | IESGKGKIWWNIRKTCYKIVEHSWFESFIVLMILLSS |
| | | GALAFEDIYIERKKTIKIILEYADKIFTYIFILEMLLK |
| | | WIAYGYKTYFTNAWCWLDFLIVDVSLVTLVANTL |
| | | GYSDLGPIKSLRTLRALRPLRALSRFEGMRVVVNA |
| | | LIGAIPSIMNVLLVCLIFWLIFSIMGVNLFAGKFYECI |
| | | NTTDGSRFPASQVPNRSECFALMNVSQNVRWKNL |
| | | KVNFDNVGLGYLSLLQVATFKGWTIIMYAAVDSV |
| | | NVDKQPKYEYSLYMYIYFVVFIIFGSFFTLNLFIGVII |
| | | DNFNQQKKKLGGQDIFMTEEQKKYYNAMKKLGS |
| | | KKPQKPIPRPLNKYQGFIFDIVTKQAFDVTIMFLICL |
| | | NMVTMMVETDDQSPEKINILAKINLLEVAIFTGECI |
| | | VKLAALRHYYFTNSWNIFDFVVVILSIVGTVLSDIIQ |
| | | KYFFSPTLFRVIRLARIGRILRLIRGAKGIRTLLFALM |
| | | MSLPALFNIGLLLFLVMFIYSIFGMANFAYVKWEA |
| | | GIDDMFNFQTFANSMLCLFQITTSAGWDGLLSPILN |
| | | TGPPYCDPTLPNSNGSRGDCGSPAVGILFFTTYIIISF |
| | | LIVVNMYIAIILENFSVATEESTEPLSEDDFDMFYEI |
| | | WEKFDPEATQFIEYSVLSDFADALSEPLRIAKPNQIS |
| | | LINMDLPMVSGDRIHCMDILFAFTKRVLGESGEMD |
| | | ALKIQMEEKFMAANPSKISYEPITTTLRRKHEEVSA |
| | | MVIQRAFRRHLLQRSLKHASFLFRQQAGSGLSEED |
| | | APEREGLIAYVMSENFSRPLGPPSSSSISSTSFPPSYD |
| | | SVTRATSDNLQVRGSDYSHSEDLADFPPSPDRDRES |
| | | IV |
| 16 | huNav157 chimera 7 | MANFLLPRGTSSFRRFTRESLAAIEKRMAEKQARG |
| | | STTLQESREGLPEEEAPRPQLDLQASKKLPDLYGNP |
| | | PQELIGEPLEDLDPFYSTQKTFIVLNKGKTIFRFSAT |
| | | NALYVLSPFHPIRRAAVKILVHSLFNMLIMCTILTN |
| | | CVFMAQHDPPPWTKYVEYTFTAIYTFESLVKILAR |
| | | GFCLHAFTFLRDPWNWLDFSVIIMAYTTEFVDLGN |
| | | VSALRTFRVLRALKTISVISGLKTIVGALIQSVKKLA |
| | | DVMVLTVFCLSVFALIGLQLFMGNLRHKCVRNFTA |
| | | LNGTNGSVEADGLVWESLDLYLSDPENYLLKNGTS |
| | | DVLLCGNSSDAGTCPEGYRCLKAGENPDHGYTSFD |
| | | SFAWAFLALFRLMTQDCWERLYQQTLRSAGKIYMI |
| | | FFMLVIFLGSFYLVNLILAVVAMAYEEQNQANIEEA |
| | | KQKELEFQQMLDRLKKEQEEAEAIAAAAAEYTSIR |
| | | RSRIMGLSESSSETSKLSSKSAKERRNRRKKKNQKK |
| | | LSSGEEKGDAEKLSKSESEDSIRRKSFHLGVEGHRR |
| | | AHEKRLSTPNQSPLSIRGSLFSARRSSRTSLFSFKGR |
| | | GRDIGSETEFADDEHSIFGDNESRRGSLFVPHRPQE |
| | | RRSSNISQASRSPPMLPVNGKMHSAVDCNGVVSLV |
| | | DGRSALMLPNGQLLPEGTTNQIHKKRRCSSYLLSE |
| | | DMLNDPNLRQRAMSRASILTNTVEELEESRQKCPP |
| | | WWYRFAHKFLIWNCSPYWIKFKKCIYFIVMDPFVD |
| | | LAITICIVLNTLFMAMEHHPMTEEFKNVLAIGNLVF |
| | | TGIFAAEMVLKLIAMDPYEYFQVGWNIFDSLIVTLS |
| | | LVELFLADVEGLSVLRSFRLLRVFKLAKSWPTLNM |
| | | LIKIIGNSVGALGNLTLVLAIIVFIFAVVGMQLFGKS |
| | | YKECVCKINDDCTLPRWHMNDFFHSFLIVFRVLCG |
| | | EWIETMWDCMEVAGQAMCLIVYMMVMVIGNLVV |
| | | LNLFLALLLSSFSADNLTAPDEDREMNNLQLALARI |
| | | QRGLRFVKRTTWDFCCGLLRQRPQKPAALAAQGQ |
| | | LPSCIATPYSPPPPETEKVPPTRKETRFEEGEQPGQG |
| | | TPGDPEPVCVPIAVAESDTDDQEEDEENSLGTEEES |
| | | SKQESQPVSGGPEAPPDSRTWSQVSATASSEAEASA |
| | | SQADWRQQWKAEPQAPGCGETPEDSCSEGSTADM |
| | | TNTAELLEQIPDLGQDVKDPEDCFTEGCVRRCPCC |
| | | AVDTTQAPGKVWWRLRKTCYHIVEHSWFETFIIFM |
| | | ILLSSGALAFEDIYLEERKTIKVLLEYADKMFTYVF |
| | | VLEMLLKWVAYGFKKYFTNAWCWLDFLIVDVSL |
| | | VSLVANTLGFAEMGPIKSLRTLRALRPLRALSRFEG |
| | | MRVVVNALVGAIPSIMNVLLVCLIFWLIFSIMGVNL |
| | | FAGKFGRCINQTEGDLPLNYTIVNNKSQCESLNLTG |
| | | ELYWTKVKVNFDNVGAGYLALLQVATFKGWMDI |
| | | MYAAVDSRGYEEQPQWEYNLYMYIYFVIFIIFGSFF |
| | | TLNLFIGVIIDNFNQQKKKLGGQDIFMTEEQKKYYN |
| | | AMKKLGSKKPQKPIPRPLNKYQGFIFDIVTKQAFDV |
| | | TIMFLICLNMVTMMVETDDQSPEKINILAKINLLFV |
| | | AIFTGECIVKLAALRHYYFTNSWNIFDFVVVILSIVG |
| | | TVLSDIIQKYFFSPTLFRVIRLARIGRILRLIRGAKGIR |
| | | TLLFALMMSLPALFNIGLLLFLVMFIYSIFGMANFA |
| | | YVKWEAGIDDMFNFQTFANSMLCLFQITTSAGWD |
| | | GLLSPILNTGPPYCDPTLPNSNGSRGDCGSPAVGILF |
| | | FTTYIIISFLIVVNMYIAIILENFSVATEESTEPLSEDD |
| | | FDMFYEIWEKFDPEATQFIEYSVLSDFADALSEPLRI |
| | | AKPNQISLINMDLPMVSGDRIHCMDILFAFTKRVLG |
| | | ESGEMDALKIQMEEKFMAANPSKISYEPITTTLRRK |
| | | HEEVSAMVIQRAFRRHLLQRSLKHASFLFRQQAGS |
| | | GLSEEDAPEREGLIAYVMSENFSRPLGPPSSSSISSTS |
| | | FPPSYDSVTRATSDNLQVRGSDYSHSEDLADFPPSP |
| | | DRDRESIV |
| 17 | huNav157 chimera 8 | MAMLPPPGPQSFVHFTKQSLALIEQRIAERKSKEPK |
| | | EEKKDDDEEAPKPSSDLEAGKQLPFIYGDIPPGMVS |
| | | EPLEDLDPYYADKKTFIVLNKGKTIFRFNATPALYM |
| | | LSPFSPLRRISIKILVHSLFSMLIMCTILTNCIFMTMN |
| | | NPPDWTKNVEYTFTGIYTFESLVKILARGFCVGEFT |
| | | FLRDPWNWLDFVVIVFAYLTEFVNLGNVSALRTFR |
| | | VLRALKTISVIPGLKTIVGALIQSVKKLSDVMILTVF |
| | | CLSVFALIGLQLFMGNLKHKCFRNSLENNETLESIM |
| | | NTLESEEDFRKYFYYLEGSKDALLCGFSTDSGQCPE |
| | | GYTCVKIGRNPDYGYTSFDTFSWAFLALFRLMTQD |
| | | YWENLYQQTLRAAGKTYMIFFVVVIFLGSFYLINLI |
| | | LAVVAMAYEEQNQATIAETEEKEKRFQEAMEMLK |
| | | KEHEALTIRGVDTVSRSSLEMSPLAPVNSHERRSKR |
| | | RKRMSSGTEECGEDRLPKSDSEDGPRAMNHLSLTR |
| | | GLSRTSMKPRSSRGSIFTFRRRDLGSEADFADDENS |
| | | TAGESESHHTSLLVPWPLRRTSAQGQPSPGTSAPGH |
| | | ALHGKKNSTVDCNGVVSLLGAGDPEATSPGSHLLR |
| | | PVMLEHPPDTTTPSEEPGGPQMLTSQAPCVDGFEEP |
| | | GARQRALSAVSVLTSALEELEESRHKCPPCWNRLA |
| | | QRYLIWECCPLWMSIKQGVKLVVMDPFTDLTITMC |
| | | IVLNTLFMALEHYNMTSEFEEMLQVGNLVFTGIFT |
| | | AEMTFKIIALDPYYYFQQGWNIFDSIIVILSLMELGL |
| | | SRMSNLSVLRSFRLLRVFKLAKSWPTLNTLIKIIGNS |
| | | VGALGNLTLVLAIIVFIFAVVGMQLFGKNYSELRDS |
| | | DSGLLPRWHMMDFFHAFLIIFRILCGEWIETMWDC |
| | | MEVSGQSLCLLVFLLVMVIGNLVVLNLFLALLLSSF |
| | | SADNLTAPDEDREMNNLQLALARIQRGLRFVKRTT |
| | | WDFCCGLLRQRPQKPAALAAQGQLPSCIATPYSPPP |
| | | PETEKVPPTRKETRFEEGEQPGQGTPGDPEPVCVPI |
| | | AVAESDTDDQEEDEENSLGTEEESSKQESQPVSGGP |
| | | EAPPDSRTWSQVSATASSEAEASASQADWRQQWK |
| | | AEPQAPGCGETPEDSCSEGSTADMINTAELLEQIPD |
| | | LGQDVKDPEDCFTEGCVRRCPCCAVDTTQAPGKV |
| | | WWRLRKTCYHIVEHSWFETFIIFMILLSSGALAFEDI |
| | | YLEERKTIKVLLEYADKMFTYVFVLEMLLKWVAY |
| | | GFKKYFTNAWCWLDFLIVDVSLVSLVANTLGFAE |
| | | MGPIKSLRTLRALRPLRALSRFEGMRVVVNALVGA |
| | | IPSIMNVLLVCLIFWLIFSIMGVNLFAGKFGRCINQT |
| | | EGDLPLNYTIVNNKSQCESLNLTGELYWTKVKVNF |
| | | DNVGAGYLALLQVATFKGWMDIMYAAVDSRGYE |
| | | EQPQWEYNLYMYIYFVIFIIFGSFFTLNLFIGVIIDNF |
| | | NQQKKKLGGQDIFMTEEQKKYYNAMKKLGSKKP |
| | | QKPIPRPLNKYQGFIFDIVTKQAFDVTIMFLICLNMV |
| | | TMMVETDDQSPEKINILAKINLLFVAIFTGECIVKLA |
| | | ALRHYYFTNSWNIFDFVVVILSIVGTVLSDIIQKYFF |
| | | SPTLFRVIRLARIGRILRLIRGAKGIRTLLFALMMSLP |
| | | ALFNIGLLLFLVMFIYSIFGMANFAYVKWEAGIDD |
| | | MFNFQTFANSMLCLFQITTSAGWDGLLSPILNTGPP |
| | | YCDPTLPNSNGSRGDCGSPAVGILFFTTYIIISFLIVV |
| | | NMYIAIILENFSVATEESTEPLSEDDFDMFYEIWEKF |
| | | DPEATQFIEYSVLSDFADALSEPLRIAKPNQISLINM |
| | | DLPMVSGDRIHCMDILFAFTKRVLGESGEMDALKI |
| | | QMEEKFMAANPSKISYEPITTTLRRKHEEVSAMVIQ |
| | | RAFRRHLLQRSLKHASFLFRQQAGSGLSEEDAPERE |
| | | GLIAYVMSENFSRPLGPPSSSSISSTSFPPSYDSVTRA |
| | | TSDNLQVRGSDYSHSEDLADFPPSPDRDRESIV |
| 18 | huNav157 chimera 12 | MAMLPPPGPQSFVHFTKQSLALIEQRIAERKSKEPK |
| | | EEKKDDDEEAPKPSSDLEAGKQLPFIYGDIPPGMVS |
| | | EPLEDLDPYYADKKTFIVLNKGKTIFRFNATPALYM |
| | | LSPFSPLRRISIKILVHSLFSMLIMCTILTNCIFMTMN |
| | | NPPDWTKNVEYTFTGIYTFESLVKILARGFCVGEFT |
| | | FLRDPWNWLDFVVIVFAYLTEFVNLGNVSALRTFR |
| | | VLRALKTISVIPGLKTIVGALIQSVKKLSDVMVLTV |
| | | FCLSVFALIGLQLFMGNLRHKCVRNFTALNGTNGS |
| | | VEADGLVWESLDLYLSDPENYLLKNGTSDVLLCG |
| | | NSSDAGTCPEGYRCLKAGENPDHGYTSFDSFAWAF |
| | | LALFRLMTQDCWERLYQQTLRSAGKIYMIFFMLVI |
| | | FLGSFYLVNLILAVVAMAYEEQNQANIEEAKQKEL |
| | | EFQQMLDRLKKEQEEAEAIAAAAAEYTSIRRSRIM |
| | | GLSESSSETSKLSSKSAKERRNRRKKKNQKKLSSGE |
| | | EKGDAEKLSKSESEDSIRRKSFHLGVEGHRRAHEK |
| | | RLSTPNQSPLSIRGSLFSARRSSRTSLFSFKGRGRDIG |
| | | SETEFADDEHSIFGDNESRRGSLFVPHRPQERRSSNI |
| | | SQASRSPPMLPVNGKMHSAVDCNGVVSLVDGRSA |
| | | LMLPNGQLLPEGTTNQIHKKRRCSSYLLSEDMLND |
| | | PNLRQRAMSRASILTNTVEELEESRQKCPPWWYRF |
| | | AHKFLIWNCSPYWIKFKKCIYFIVMDPFVDLAITICI |
| | | VLNTLFMAMEHHPMTEEFKNVLAIGNLVFTGIFAA |
| | | EMVLKLIAMDPYEYFQVGWNIFDSLIVTLSLVELFL |
| | | ADVEGLSVLRSFRLLRVFKLAKSWPTLNMLIKIIGN |
| | | SVGALGNLTLVLAIIVFIFAVVGMQLFGKSYKECVC |
| | | KINDDCTLPRWHMNDFFHSFLIVFRVLCGEWIETM |
| | | WDCMEVAGQAMCLIVYMMVMVIGNLVVLNLFLA |
| | | LLLSSFSSDNLTAIEEDPDANNLQIAVTRIKKGINYV |
| | | KQTLREFILKAFSKKPKISREIRQAEDLNTKKENYIS |
| | | NHTLAEMSKGHNFLKEKDKISGFGSSVDKHLMEDS |
| | | DGQSFIHNPSLTVTVPIAPGESDLENMNAEELSSDS |
| | | DSEYSKVRLNRSSSSECSTVDNPLPGEGEEAEAEPM |
| | | NSDEPEACFTDGCVRRFSCCQVNIESGKGKIWWNI |
| | | RKTCYKIVEHSWFESFIVLMILLSSGALAFEDIYIER |
| | | KKTIKIILEYADKIFTYIFILEMLLKWIAYGYKTYFT |
| | | NAWCWLDFLIVDVSLVTLVANTLGYSDLGPIKSLR |
| | | TLRALRPLRALSRFEGMRVVVNALIGAIPSIMNVLL |
| | | VCLIFWLIFSIMGVNLFAGKFYECINTTDGSRFPASQ |
| | | VPNRSECFALMNVSQNVRWKNLKVNFDNVGLGY |
| | | LSLLQVATFKGWTIIMYAAVDSVNVDKQPKYEYSL |
| | | YMYIYFVVFIIFGSFFTLNLFIGVIIDNFNQQKKKLG |
| | | GQDIFMTEEQKKYYNAMKKLGSKKPQKPIPRPGNK |
| | | IQGCIFDLVTNQAFDISIMVLICLNMVTMMVEKEGQ |
| | | SQHMTEVLYWINVVFIILFTGECVLKLISLRHYYFT |
| | | VGWNIFDFVVVIISIVGMFLADLIETYFVSPTLFRVI |
| | | RLARIGRILRLVKGAKGIRTLLFALMMSLPALFNIG |
| | | LLLFLVMFIYAIFGMSNFAYVKKEDGINDMFNFETF |
| | | GNSMICLFQITTSAGWDGLLAPILNSKPPDCDPKKV |
| | | HPGSSVEGDCGNPSVGIFYFVSYIIISFLVVVNMYIA |
| | | VILENFSVATEESTEPLSEDDFEMFYEVWEKFDPDA |
| | | TQFIEFSKLSDFAAALDPPLLIAKPNKVQLIAMDLP |
| | | MVSGDRIHCLDILFAFTKRVLGESGEMDSLRSQME |
| | | ERFMSANPSKVSYEPITTTLKRKQEDVSATVIQRAY |
| | | RRYRLRQNVKNISSIYIKDGDRDDDLLNKKDMAFD |
| | | NVNENSSPEKTDATSSTTSPPSYDSVTKPDKEKYEQ |
| | | DRTEKEDKGKDSKESKK |
| 19 | huNav157 chimera 14 | MANFLLPRGTSSFRRFTRESLAAIEKRMAEKQARG |
| | | STTLQESREGLPEEEAPRPQLDLQASKKLPDLYGNP |
| | | PQELIGEPLEDLDPFYSTQKTFIVLNKGKTIFRFSAT |
| | | NALYVLSPFHPIRRAAVKILVHSLFSMLIMCTILTNC |
| | | IFMTMNNPPDWTKNVEYTFTGIYTFESLVKILARGF |
| | | CLHAFTFLRDPWNWLDFVVIVFAYLTEFVNLGNVS |
| | | ALRTFRVLRALKTISVIPGLKTIVGALIQSVKKLADV |
| | | MILTVFCLSVFALIGLQLFMGNLKHKCFRNSLENNE |
| | | TLESIMNTLESEEDFRKYFYYLEGSKDALLCGFSTD |
| | | SGQCPEGYTCVKIGRNPDYGYTSFDTFSWAFLALF |
| | | RLMTQDYWENLYQQTLRAAGKTYMIFFVVVIFLG |
| | | SFYLINLILAVVAMAYEEQNQATIAETEEKEKRFQE |
| | | AMEMLKKEHEALTIRGVDTVSRSSLEMSPLAPVNS |
| | | HERRSKRRKRMSSGTEECGEDRLPKSDSEDGPRAM |
| | | NHLSLTRGLSRTSMKPRSSRGSIFTFRRRDLGSEAD |
| | | FADDENSTAGESESHHTSLLVPWPLRRTSAQGQPSP |
| | | GTSAPGHALHGKKNSTVDCNGVVSLLGAGDPEAT |
| | | SPGSHLLRPVMLEHPPDTTTPSEEPGGPQMLTSQAP |
| | | CVDGFEEPGARQRALSAVSVLTSALEELEESRHKCP |
| | | PCWNRLAQRYLIWECCPLWMSIKQGVKFIVMDPF |
| | | VDLAITICIVLNTLFMAMEHHPMTEEFKNVLAIGNL |
| | | VFTGIFAAEMVLKLIAMDPYYYFQQGWNIFDSLIVT |
| | | LSLVELFLADVEGLSVLRSFRLLRVFKLAKSWPTLN |
| | | TLIKIIGNSVGALGNLTLVLAIIVFIFAVVGMQLFGK |
| | | SYKECVCKINDDCTLPRWHMNDFFHSFLIVFRVLC |
| | | GEWIETMWDCMEVAGQAMCLIVYMMVMVIGNLV |
| | | VLNLFLALLLSSFSADNLTAPDEDREMNNLQLALA |
| | | RIQRGLRFVKRTTWDFCCGLLRQRPQKPAALAAQG |
| | | QLPSCIATPYSPPPPETEKVPPTRKETRFEEGEQPGQ |
| | | GTPGDPEPVCVPIAVAESDTDDQEEDEENSLGTEEE |
| | | SSKQESQPVSGGPEAPPDSRTWSQVSATASSEAEAS |
| | | ASQADWRQQWKAEPQAPGCGETPEDSCSEGSTAD |
| | | MTNTAELLEQIPDLGQDVKDPEDCFTEGCVRRCPC |
| | | CAVDTTQAPGKVWWRLRKTCYHIVEHSWFESFIVL |
| | | MILLSSGALAFEDIYIERKKTIKIILEYADKIFTYIFIL |
| | | EMLLKWIAYGYKKYFTNAWCWLDFLIVDVSLVTL |
| | | VANTLGYSDLGPIKSLRTLRALRPLRALSRFEGMRV |
| | | VVNALVGAIPSIMNVLLVCLIFWLIFSIMGVNLFAG |
| | | KFYECINTTDGSRFPASQVPNRSECFALMNVSQNV |
| | | RWKNLKVNFDNVGLGYLSLLQVATFKGWTIIMYA |
| | | AVDSVNVDKQPKYEYSLYMYIYFVVFIIFGSFFTLN |
| | | LFIGVIIDNFNQQKKKLGGQDIFMTEEQKKYYNAM |
| | | KKLGSKKPQKPIPRPLNKYQGFIFDLVTNQAFDISIM |
| | | VLICLNMVTMMVEKEGQSQHMTEVLYWINVVFIIL |
| | | FTGECVLKLISLRHYYFTVGWNIFDFVVVIISIVGMF |
| | | LADLIETYFVSPTLFRVIRLARIGRILRLVKGAKGIR |
| | | TLLFALMMSLPALFNIGLLLFLVMFIYAIFGMSNFA |
| | | YVKKEDGINDMFNFETFGNSMICLFQITTSAGWDG |
| | | LLAPILNSKPPDCDPKKVHPGSSVEGDCGNPSVGIF |
| | | YFVSYIIISFLVVVNMYIAVILENFSVATEESTEPLSE |
| | | DDFDMFYEIWEKFDPEATQFIEYSVLSDFADALSEP |
| | | LRIAKPNQISLINMDLPMVSGDRIHCMDILFAFTKR |
| | | VLGESGEMDALKIQMEEKFMAANPSKISYEPITTTL |
| | | RRKHEEVSAMVIQRAFRRHLLQRSLKHASFLFRQQ |
| | | AGSGLSEEDAPEREGLIAYVMSENFSRPLGPPSSSSI |
| | | SSTSFPPSYDSVTRATSDNLQVRGSDYSHSEDLADF |
| | | PPSPDRDRESIV |
| 20 | huNav157 chimera 14- | MANFLLPRGTSSFRRFTRESLAAIEKRMAEKQARG |
| | beta1-beta2-beta3 viral | STTLQESREGLPEEEAPRPQLDLQASKKLPDLYGNP |
| | P2A sequences italics; | PQELIGEPLEDLDPFYSTQKTFIVLNKGKTIFRFSAT |
| | beta1-beta2-beta3 are in | NALYVLSPFHPIRRAAVKILVHSLFSMLIMCTILTNC |
| | bold | IFMTMNNPPDWTKNVEYTFTGIYTFESLVKILARGF |
| | | CLHAFTFLRDPWNWLDFVVIVFAYLTEFVNLGNVS |
| | | ALRTFRVLRALKTISVIPGLKTIVGALIQSVKKLADV |
| | | MILTVFCLSVFALIGLQLFMGNLKHKCFRNSLENNE |
| | | TLESIMNTLESEEDFRKYFYYLEGSKDALLCGFSTD |
| | | SGQCPEGYTCVKIGRNPDYGYTSFDTFSWAFLALF |
| | | RLMTQDYWENLYQQTLRAAGKTYMIFFVVVIFLG |
| | | SFYLINLILAVVAMAYEEQNQATIAETEEKEKRFQE |
| | | AMEMLKKEHEALTIRGVDTVSRSSLEMSPLAPVNS |
| | | HERRSKRRKRMSSGTEECGEDRLPKSDSEDGPRAM |
| | | NHLSLTRGLSRTSMKPRSSRGSIFTFRRRDLGSEAD |
| | | FADDENSTAGESESHHTSLLVPWPLRRTSAQGQPSP |
| | | GTSAPGHALHGKKNSTVDCNGVVSLLGAGDPEAT |
| | | SPGSHLLRPVMLEHPPDTTTPSEEPGGPQMLTSQAP |
| | | CVDGFEEPGARQRALSAVSVLTSALEELEESRHKCP |
| | | PCWNRLAQRYLIWECCPLWMSIKQGVKFIVMDPF |
| | | VDLAITICIVLNTLFMAMEHHPMTEEFKNVLAIGNL |
| | | VFTGIFAAEMVLKLIAMDPYYYFQQGWNIFDSLIVT |
| | | LSLVELFLADVEGLSVLRSFRLLRVFKLAKSWPTLN |
| | | TLIKIIGNSVGALGNLTLVLAIIVFIFAVVGMQLFGK |
| | | SYKECVCKINDDCTLPRWHMNDFFHSFLIVFRVLC |
| | | GEWIETMWDCMEVAGQAMCLIVYMMVMVIGNLV |
| | | VLNLFLALLLSSFSADNLTAPDEDREMNNLQLALA |
| | | RIQRGLRFVKRTTWDFCCGLLRQRPQKPAALAAQG |
| | | QLPSCIATPYSPPPPETEKVPPTRKETRFEEGEQPGQ |
| | | GTPGDPEPVCVPIAVAESDTDDQEEDEENSLGTEEE |
| | | SSKQESQPVSGGPEAPPDSRTWSQVSATASSEAEAS |
| | | ASQADWRQQWKAEPQAPGCGETPEDSCSEGSTAD |
| | | MTNTAELLEQIPDLGQDVKDPEDCFTEGCVRRCPC |
| | | CAVDTTQAPGKVWWRLRKTCYHIVEHSWFESFIVL |
| | | MILLSSGALAFEDIYIERKKTIKIILEYADKIFTYIFIL |
| | | EMLLKWIAYGYKKYFTNAWCWLDFLIVDVSLVTL |
| | | VANTLGYSDLGPIKSLRTLRALRPLRALSRFEGMRV |
| | | VVNALVGAIPSIMNVLLVCLIFWLIFSIMGVNLFAG |
| | | KFYECINTTDGSRFPASQVPNRSECFALMNVSQNV |
| | | RWKNLKVNFDNVGLGYLSLLQVATFKGWTIIMYA |
| | | AVDSVNVDKQPKYEYSLYMYIYFVVFIIFGSFFTLN |
| | | LFIGVIIDNFNQQKKKLGGQDIFMTEEQKKYYNAM |
| | | KKLGSKKPQKPIPRPLNKYQGFIFDLVTNQAFDISIM |
| | | VLICLNMVTMMVEKEGQSQHMTEVLYWINVVFIIL |
| | | FTGECVLKLISLRHYYFTVGWNIFDFVVVIISIVGMF |
| | | LADLIETYFVSPTLFRVIRLARIGRILRLVKGAKGIR |
| | | TLLFALMMSLPALFNIGLLLFLVMFIYAIFGMSNFA |
| | | YVKKEDGINDMFNFETFGNSMICLFQITTSAGWDG |
| | | LLAPILNSKPPDCDPKKVHPGSSVEGDCGNPSVGIF |
| | | YFVSYIIISFLVVVNMYIAVILENFSVATEESTEPLSE |
| | | DDFDMFYEIWEKFDPEATQFIEYSVLSDFADALSEP |
| | | LRIAKPNQISLINMDLPMVSGDRIHCMDILFAFTKR |
| | | VLGESGEMDALKIQMEEKFMAANPSKISYEPITTTL |
| | | RRKHEEVSAMVIQRAFRRHLLQRSLKHASFLFRQQ |
| | | AGSGLSEEDAPEREGLIAYVMSENFSRPLGPPSSSSI |
| | | SSTSFPPSYDSVTRATSDNLQVRGSDYSHSEDLADF |
| | | PPSPDRDRESIVSGRGSGATNFSLLKQAGDVEENPGP |
| | | MGRLLALVVGAALVSSACGGCVEVDSETEAVY |
| | | GMTFKILCISCKRRSETNAETFTEWTFRQKGTE |
| | | EFVKILRYENEVLQLEEDERFEGRVVWNGSRGT |
| | | KDLQDLSIFITNVTYNHSGDYECHVYRLLFFENY |
| | | EHNTSVVKKIHIEVVDKANRDMASIVSEIMMYV |
| | | LIVVLTIWLVAEMIYCYKKIAAATETAAQENASE |
| | | YLAITSESKENCTGVQVAEGSGATNFSLLKQAGDV |
| | | EENPGPMHRDAWLPRPAFSLTGLSLFFSLVPPGR |
| | | SMEVTVPATLNVLNGSDARLPCTFNSCYTVNHK |
| | | QFSLNWTYQECNNCSEEMFLQFRMKIINLKLER |
| | | FQDRVEFSGNPSKYDVSVMLRNVQPEDEGIYNC |
| | | YIMNPPDRHRGHGKIHLQVLMEEPPERDSTVAV |
| | | IVGASVGGFLAVVILVLMVVKCVRRKKEQKLST |
| | | DDLKTEEEGKTDGEGNPDDGAKGSGATNFSLLKQ |
| | | AGDVEENPGPMPAFNRLFPLASLVLIYWVSVCFP |
| | | VCVEVPSETEAVQGNPMKLRCISCMKREEVEAT |
| | | TVVEWFYRPEGGKDFLIYEYRNGHQEVESPFQG |
| | | RLQWNGSKDLQDVSITVLNVTLNDSGLYTCNVS |
| | | REFEFEAHRPFVKTTRLIPLRVTEEAGEDFTSVV |
| | | SEIMMYILLVFLTLWLLIEMIYCYRKVSKAEEAA |
| | | QENASDYLAIPSENKENSAVPVEE |
| 21 | beta1-beta2-beta3 viral | MGRLLALVVGAALVSSACGGCVEVDSETEAVY |
| | P2A sequences italics; | GMTFKILCISCKRRSETNAETFTEWTFRQKGTE |
| | beta1-beta2-beta3 are in | EFVKILRYENEVLQLEEDERFEGRVVWNGSRGT |
| | bold | KDLQDLSIFITNVTYNHSGDYECHVYRLLFFENY |
| | | EHNTSVVKKIHIEVVDKANRDMASIVSEIMMYV |
| | | LIVVLTIWLVAEMIYCYKKIAAATETAAQENASE |
| | | YLAITSESKENCTGVQVAEGSGATNFSLLKQAGDV |
| | | EENPGPMHRDAWLPRPAFSLTGLSLFFSLVPPGR |
| | | SMEVTVPATLNVLNGSDARLPCTFNSCYTVNHK |
| | | QFSLNWTYQECNNCSEEMFLQFRMKIINLKLER |
| | | FQDRVEFSGNPSKYDVSVMLRNVQPEDEGIYNC |
| | | YIMNPPDRHRGHGKIHLQVLMEEPPERDSTVAV |
| | | IVGASVGGFLAVVILVLMVVKCVRRKKEQKLST |
| | | DDLKTEEEGKTDGEGNPDDGAKGSGATNFSLLKQ |
| | | AGDVEENPGPMPAFNRLFPLASLVLIYWVSVCFP |
| | | VCVEVPSETEAVQGNPMKLRCISCMKREEVEAT |
| | | TVVEWFYRPEGGKDFLIYEYRNGHQEVESPFQG |
| | | RLQWNGSKDLQDVSITVLNVTLNDSGLYTCNVS |
| | | REFEFEAHRPFVKTTRLIPLRVTEEAGEDFTSVV |
| | | SEIMMYILLVFLTLWLLIEMIYCYRKVSKAEEAA |
| | | QENASDYLAIPSENKENSAVPVEE |
| 22 | huNav1.5-beta1-beta2- | MANFLLPRGTSSFRRFTRESLAAIEKRMAEKQARG |
| | beta3 viral P2A | STTLQESREGLPEEEAPRPQLDLQASKKLPDLYGNP |
| | sequences italics; beta1- | PQELIGEPLEDLDPFYSTQKTFIVLNKGKTIFRFSAT |
| | beta2-beta3 are in bold | NALYVLSPFHPIRRAAVKILVHSLFNMLIMCTILTN |
| | | CVFMAQHDPPPWTKYVEYTFTAIYTFESLVKILAR |
| | | GFCLHAFTFLRDPWNWLDFSVIIMAYTTEFVDLGN |
| | | VSALRTFRVLRALKTISVISGLKTIVGALIQSVKKLA |
| | | DVMVLTVFCLSVFALIGLQLFMGNLRHKCVRNFTA |
| | | LNGTNGSVEADGLVWESLDLYLSDPENYLLKNGTS |
| | | DVLLCGNSSDAGTCPEGYRCLKAGENPDHGYTSFD |
| | | SFAWAFLALFRLMTQDCWERLYQQTLRSAGKIYMI |
| | | FFMLVIFLGSFYLVNLILAVVAMAYEEQNQATIAET |
| | | EEKEKRFQEAMEMLKKEHEALTIRGVDTVSRSSLE |
| | | MSPLAPVNSHERRSKRRKRMSSGTEECGEDRLPKS |
| | | DSEDGPRAMNHLSLTRGLSRTSMKPRSSRGSIFTFR |
| | | RRDLGSEADFADDENSTAGESESHHTSLLVPWPLR |
| | | RTSAQGQPSPGTSAPGHALHGKKNSTVDCNGVVSL |
| | | LGAGDPEATSPGSHLLRPVMLEHPPDTTTPSEEPGG |
| | | PQMLTSQAPCVDGFEEPGARQRALSAVSVLTSALE |
| | | ELEESRHKCPPCWNRLAQRYLIWECCPLWMSIKQG |
| | | VKLVVMDPFTDLTITMCIVLNTLFMALEHYNMTSE |
| | | FEEMLQVGNLVFTGIFTAEMTFKIIALDPYYYFQQG |
| | | WNIFDSIIVILSLMELGLSRMSNLSVLRSFRLLRVFK |
| | | LAKSWPTLNTLIKIIGNSVGALGNLTLVLAIIVFIFA |
| | | VVGMQLFGKNYSELRDSDSGLLPRWHMMDFFHAF |
| | | LIIFRILCGEWIETMWDCMEVSGQSLCLLVFLLVMV |
| | | IGNLVVLNLFLALLLSSFSADNLTAPDEDREMNNL |
| | | QLALARIQRGLRFVKRTTWDFCCGLLRQRPQKPAA |
| | | LAAQGQLPSCIATPYSPPPPETEKVPPTRKETRFEEG |
| | | EQPGQGTPGDPEPVCVPIAVAESDTDDQEEDEENSL |
| | | GTEEESSKQESQPVSGGPEAPPDSRTWSQVSATASS |
| | | EAEASASQADWRQQWKAEPQAPGCGETPEDSCSE |
| | | GSTADMTNTAELLEQIPDLGQDVKDPEDCFTEGCV |
| | | RRCPCCAVDTTQAPGKVWWRLRKTCYHIVEHSWF |
| | | ETFIIFMILLSSGALAFEDIYLEERKTIKVLLEYADK |
| | | MFTYVFVLEMLLKWVAYGFKKYFTNAWCWLDFL |
| | | IVDVSLVSLVANTLGFAEMGPIKSLRTLRALRPLRA |
| | | LSRFEGMRVVVNALVGAIPSIMNVLLVCLIFWLIFSI |
| | | MGVNLFAGKFGRCINQTEGDLPLNYTIVNNKSQCE |
| | | SLNLTGELYWTKVKVNFDNVGAGYLALLQVATFK |
| | | GWMDIMYAAVDSRGYEEQPQWEYNLYMYIYFVIF |
| | | IIFGSFFTLNLFIGVIIDNFNQQKKKLGGQDIFMTEEQ |
| | | KKYYNAMKKLGSKKPQKPIPRPLNKYQGFIFDIVT |
| | | KQAFDVTIMFLICLNMVTMMVETDDQSPEKINILA |
| | | KINLLEVAIFTGECIVKLAALRHYYFTNSWNIFDFV |
| | | VVILSIVGTVLSDIIQKYFFSPTLFRVIRLARIGRILRL |
| | | IRGAKGIRTLLFALMMSLPALFNIGLLLFLVMFIYSI |
| | | FGMANFAYVKWEAGIDDMFNFQTFANSMLCLFQI |
| | | TTSAGWDGLLSPILNTGPPYCDPTLPNSNGSRGDCG |
| | | SPAVGILFFTTYIIISFLIVVNMYIAIILENFSVATEEST |
| | | EPLSEDDFDMFYEIWEKFDPEATQFIEYSVLSDFAD |
| | | ALSEPLRIAKPNQISLINMDLPMVSGDRIHCMDILFA |
| | | FTKRVLGESGEMDALKIQMEEKFMAANPSKISYEPI |
| | | TTTLRRKHEEVSAMVIQRAFRRHLLQRSLKHASFLF |
| | | RQQAGSGLSEEDAPEREGLIAYVMSENFSRPLGPPS |
| | | SSSISSTSFPPSYDSVTRATSDNLQVRGSDYSHSEDL |
| | | ADFPPSPDRDRESIVSGRGSGATNFSLLKQAGDVEEN |
| | | PGPMGRLLALVVGAALVSSACGGCVEVDSETEA |
| | | VYGMTFKILCISCKRRSETNAETFTEWTFRQKG |
| | | TEEFVKILRYENEVLQLEEDERFEGRVVWNGSR |
| | | GTKDLQDLSIFITNVTYNHSGDYECHVYRLLFFE |
| | | NYEHNTSVVKKIHIEVVDKANRDMASIVSEIMM |
| | | YVLIVVLTIWLVAEMIYCYKKIAAATETAAQEN |
| | | ASEYLAITSESKENCTGVQVAEGSGATNFSLLKQA |
| | | GDVEENPGPMHRDAWLPRPAFSLTGLSLFFSLVP |
| | | PGRSMEVTVPATLNVLNGSDARLPCTFNSCYTV |
| | | NHKQFSLNWTYQECNNCSEEMFLQFRMKIINLK |
| | | LERFQDRVEFSGNPSKYDVSVMLRNVQPEDEGI |
| | | YNCYIMNPPDRHRGHGKIHLQVLMEEPPERDST |
| | | VAVIVGASVGGFLAVVILVLMVVKCVRRKKEQK |
| | | LSTDDLKTEEEGKTDGEGNPDDGAKGSGATNFSL |
| | | LKQAGDVEENPGPMPAFNRLFPLASLVLIYWVSV |
| | | CFPVCVEVPSETEAVQGNPMKLRCISCMKREEV |
| | | EATTVVEWFYRPEGGKDFLIYEYRNGHQEVESP |
| | | FQGRLQWNGSKDLQDVSITVLNVTLNDSGLYTC |
| | | NVSREFEFEAHRPFVKTTRLIPLRVTEEAGEDFT |
| | | SVVSEIMMYILLVFLTLWLLIEMIYCYRKVSKAE |
| | | EAAQENASDYLAIPSENKENSAVPVEE |
| 23 | huNav1.1 (alpha | MEQTVLVPPGPDSFNFFTRESLAAIERRIAEEKAKN |
| | subunit) | PKPDKKDDDENGPKPNSDLEAGKNLPFIYGDIPPEM |
| | | VSEPLEDLDPYYINKKTFIVLNKGKAIFRFSATSALY |
| | | ILTPFNPLRKIAIKILVHSLFSMLIMCTILTNCVFMTM |
| | | SNPPDWTKNVEYTFTGIYTFESLIKIIARGFCLEDFT |
| | | FLRDPWNWLDFTVITFAYVTEFVDLGNVSALRTFR |
| | | VLRALKTISVIPGLKTIVGALIQSVKKLSDVMILTVF |
| | | CLSVFALIGLQLFMGNLRNKCIQWPPTNASLEEHSI |
| | | EKNITVNYNGTLINETVFEFDWKSYIQDSRYHYFLE |
| | | GFLDALLCGNSSDAGQCPEGYMCVKAGRNPNYGY |
| | | TSFDTFSWAFLSLFRLMTQDFWENLYQLTLRAAGK |
| | | TYMIFFVLVIFLGSFYLINLILAVVAMAYEEQNQAT |
| | | LEEAEQKEAEFQQMIEQLKKQQEAAQQAATATAS |
| | | EHSREPSAAGRLSDSSSEASKLSSKSAKERRNRRKK |
| | | RKQKEQSGGEEKDEDEFQKSESEDSIRRKGFRFSIE |
| | | GNRLTYEKRYSSPHQSLLSIRGSLFSPRRNSRTSLFS |
| | | FRGRAKDVGSENDFADDEHSTFEDNESRRDSLFVP |
| | | RRHGERRNSNLSQTSRSSRMLAVFPANGKMHSTV |
| | | DCNGVVSLVGGPSVPTSPVGQLLPEVIIDKPATDDN |
| | | GTTTETEMRKRRSSSFHVSMDFLEDPSQRQRAMSI |
| | | ASILTNTVEELEESRQKCPPCWYKFSNIFLIWDCSPY |
| | | WLKVKHVVNLVVMDPFVDLAITICIVLNTLFMAM |
| | | EHYPMTDHFNNVLTVGNLVFTGIFTAEMFLKIIAM |
| | | DPYYYFQEGWNIFDGFIVTLSLVELGLANVEGLSVL |
| | | RSFRLLRVFKLAKSWPTLNMLIKIIGNSVGALGNLT |
| | | LVLAIIVFIFAVVGMQLFGKSYKDCVCKIASDCQLP |
| | | RWHMNDFFHSFLIVFRVLCGEWIETMWDCMEVAG |
| | | QAMCLTVFMMVMVIGNLVVLNLFLALLLSSFSAD |
| | | NLAATDDDNEMNNLQIAVDRMHKGVAYVKRKIY |
| | | EFIQQSFIRKQKILDEIKPLDDLNNKKDSCMSNHTA |
| | | EIGKDLDYLKDVNGTTSGIGTGSSVEKYIIDESDYM |
| | | SFINNPSLTVTVPIAVGESDFENLNTEDFSSESDLEES |
| | | KEKLNESSSSSEGSTVDIGAPVEEQPVVEPEETLEPE |
| | | ACFTEGCVQRFKCCQINVEEGRGKQWWNLRRTCF |
| | | RIVEHNWFETFIVFMILLSSGALAFEDIYIDQRKTIK |
| | | TMLEYADKVFTYIFILEMLLKWVAYGYQTYFTNA |
| | | WCWLDFLIVDVSLVSLTANALGYSELGAIKSLRTL |
| | | RALRPLRALSRFEGMRVVVNALLGAIPSIMNVLLV |
| | | CLIFWLIFSIMGVNLFAGKFYHCINTTTGDRFDIEDV |
| | | NNHTDCLKLIERNETARWKNVKVNFDNVGFGYLS |
| | | LLQVATFKGWMDIMYAAVDSRNVELQPKYEESLY |
| | | MYLYFVIFIIFGSFFTLNLFIGVIIDNFNQQKKKFGGQ |
| | | DIFMTEEQKKYYNAMKKLGSKKPQKPIPRPGNKFQ |
| | | GMVFDFVTRQVFDISIMILICLNMVTMMVETDDQS |
| | | EYVTTILSRINLVFIVLFTGECVLKLISLRHYYFTIG |
| | | WNIFDFVVVILSIVGMFLAELIEKYFVSPTLFRVIRL |
| | | ARIGRILRLIKGAKGIRTLLFALMMSLPALFNIGLLL |
| | | FLVMFIYAIFGMSNFAYVKREVGIDDMFNFETFGNS |
| | | MICLFQITTSAGWDGLLAPILNSKPPDCDPNKVNPG |
| | | SSVKGDCGNPSVGIFFFVSYIIISFLVVVNMYIAVILE |
| | | NFSVATEESAEPLSEDDFEMFYEVWEKFDPDATQF |
| | | MEFEKLSQFAAALEPPLNLPQPNKLQLIAMDLPMV |
| | | SGDRIHCLDILFAFTKRVLGESGEMDALRIQMEERF |
| | | MASNPSKVSYQPITTTLKRKQEEVSAVIIQRAYRRH |
| | | LLKRTVKQASFTYNKNKIKGGANLLIKEDMIIDRIN |
| | | ENSITEKTDLTMSTAACPPSYDRVTKPIVEKHEQEG |
| | | KDEKAKGK |
| 24 | huNav1.2 (alpha | MAQSVLVPPGPDSFRFFTRESLAAIEQRIAEEKAKR |
| | subunit) | PKQERKDEDDENGPKPNSDLEAGKSLPFIYGDIPPE |
| | | MVSVPLEDLDPYYINKKTFIVLNKGKAISRFSATPA |
| | | LYILTPFNPIRKLAIKILVHSLFNMLIMCTILTNCVFM |
| | | TMSNPPDWTKNVEYTFTGIYTFESLIKILARGFCLE |
| | | DFTFLRDPWNWLDFTVITFAYVTEFVDLGNVSALR |
| | | TFRVLRALKTISVIPGLKTIVGALIQSVKKLSDVMIL |
| | | TVFCLSVFALIGLQLFMGNLRNKCLQWPPDNSSFEI |
| | | NITSFFNNSLDGNGTTFNRTVSIFNWDEYIEDKSHF |
| | | YFLEGQNDALLCGNSSDAGQCPEGYICVKAGRNPN |
| | | YGYTSFDTFSWAFLSLFRLMTQDFWENLYQLTLRA |
| | | AGKTYMIFFVLVIFLGSFYLINLILAVVAMAYEEQN |
| | | QATLEEAEQKEAEFQQMLEQLKKQQEEAQAAAAA |
| | | ASAESRDFSGAGGIGVFSESSSVASKLSSKSEKELK |
| | | NRRKKKKQKEQSGEEEKNDRVRKSESEDSIRRKGF |
| | | RFSLEGSRLTYEKRFSSPHQSLLSIRGSLFSPRRNSR |
| | | ASLFSFRGRAKDIGSENDFADDEHSTFEDNDSRRDS |
| | | LFVPHRHGERRHSNVSQASRASRVLPILPMNGKMH |
| | | SAVDCNGVVSLVGGPSTLTSAGQLLPEGTTTETEIR |
| | | KRRSSSYHVSMDLLEDPTSRQRAMSIASILTNTMEE |
| | | LEESRQKCPPCWYKFANMCLIWDCCKPWLKVKHL |
| | | VNLVVMDPFVDLAITICIVLNTLFMAMEHYPMTEQ |
| | | FSSVLSVGNLVFTGIFTAEMFLKIIAMDPYYYFQEG |
| | | WNIFDGFIVSLSLMELGLANVEGLSVLRSFRLLRVF |
| | | KLAKSWPTLNMLIKIIGNSVGALGNLTLVLAIIVFIF |
| | | AVVGMQLFGKSYKECVCKISNDCELPRWHMHDFF |
| | | HSFLIVFRVLCGEWIETMWDCMEVAGQTMCLTVF |
| | | MMVMVIGNLVVLNLFLALLLSSFSSDNLAATDDD |
| | | NEMNNLQIAVGRMQKGIDFVKRKIREFIQKAFVRK |
| | | QKALDEIKPLEDLNNKKDSCISNHTTIEIGKDLNYL |
| | | KDGNGTTSGIGSSVEKYVVDESDYMSFINNPSLTVT |
| | | VPIAVGESDFENLNTEEFSSESDMEESKEKLNATSSS |
| | | EGSTVDIGAPAEGEQPEVEPEESLEPEACFTEDCVR |
| | | KFKCCQISIEEGKGKLWWNLRKTCYKIVEHNWFET |
| | | FIVFMILLSSGALAFEDIYIEQRKTIKTMLEYADKVF |
| | | TYIFILEMLLKWVAYGFQVYFTNAWCWLDFLIVDV |
| | | SLVSLTANALGYSELGAIKSLRTLRALRPLRALSRF |
| | | EGMRVVVNALLGAIPSIMNVLLVCLIFWLIFSIMGV |
| | | NLFAGKFYHCINYTTGEMFDVSVVNNYSECKALIE |
| | | SNQTARWKNVKVNFDNVGLGYLSLLQVATFKGW |
| | | MDIMYAAVDSRNVELQPKYEDNLYMYLYFVIFIIF |
| | | GSFFTLNLFIGVIIDNFNQQKKKFGGQDIFMTEEQK |
| | | KYYNAMKKLGSKKPQKPIPRPANKFQGMVFDFVT |
| | | KQVFDISIMILICLNMVTMMVETDDQSQEMTNILY |
| | | WINLVFIVLFTGECVLKLISLRYYYFTIGWNIFDFVV |
| | | VILSIVGMFLAELIEKYFVSPTLFRVIRLARIGRILRLI |
| | | KGAKGIRTLLFALMMSLPALFNIGLLLFLVMFIYAIF |
| | | GMSNFAYVKREVGIDDMFNFETFGNSMICLFQITTS |
| | | AGWDGLLAPILNSGPPDCDPDKDHPGSSVKGDCGN |
| | | PSVGIFFFVSYIIISFLVVVNMYIAVILENFSVATEES |
| | | AEPLSEDDFEMFYEVWEKFDPDATQFIEFAKLSDFA |
| | | DALDPPLLIAKPNKVQLIAMDLPMVSGDRIHCLDIL |
| | | FAFTKRVLGESGEMDALRIQMEERFMASNPSKVSY |
| | | EPITTTLKRKQEEVSAIIIQRAYRRYLLKQKVKKVSS |
| | | IYKKDKGKECDGTPIKEDTLIDKLNENSTPEKTDMT |
| | | PSTTSPPSYDSVTKPEKEKFEKDKSEKEDKGKDIRE |
| | | SKK |
| 25 | huNav1.3 (alpha | MAQALLVPPGPESFRLFTRESLAAIEKRAAEEKAKK |
| | subunit) | PKKEQDNDDENKPKPNSDLEAGKNLPFIYGDIPPE |
| | | MVSEPLEDLDPYYINKKTFIVMNKGKAIFRFSATSA |
| | | LYILTPLNPVRKIAIKILVHSLFSMLIMCTILTNCVFM |
| | | TLSNPPDWTKNVEYTFTGIYTFESLIKILARGFCLED |
| | | FTFLRDPWNWLDFSVIVMAYVTEFVSLGNVSALRT |
| | | FRVLRALKTISVIPGLKTIVGALIQSVKKLSDVMILT |
| | | VFCLSVFALIGLQLFMGNLRNKCLQWPPSDSAFET |
| | | NTTSYFNGTMDSNGTFVNVTMSTFNWKDYIGDDS |
| | | HFYVLDGQKDPLLCGNGSDAGQCPEGY |
| | | ICVKAGRNPNYGYTSFDTFSWAFLSLFRLMTQDYW |
| | | ENLYQLTLRAAGKTYMIFFVLVIFLGSFYLVNLILA |
| | | VVAMAYEEQNQATLEEAEQKEAEFQQMLEQLKK |
| | | QQEEAQAVAAASAASRDFSGIGGLGELLESSSEASK |
| | | LSSKSAKEWRNRRKKRRQREHLEGNNKGERDSFP |
| | | KSESEDSVKRSSFLFSMDGNRLTSDKKFCSPHQSLL |
| | | SIRGSLFSPRRNSKTSIFSFRGRAKDVGSENDFADDE |
| | | HSTFEDSESRRDSLFVPHRHGERRNSNVSQASMSSR |
| | | MVPGLPANGKMHSTVDCNGVVSLVGGPSALTSPT |
| | | GQLPPEGTTTETEVRKRRLSSYQISMEMLEDSSGRQ |
| | | RAVSIASILTNTMEELEESRQKCPPCWYRFANVFLI |
| | | WDCCDAWLKVKHLVNLIVMDPFVDLAITICI |
| | | VLNTLFMAMEHYPMTEQFSSVLTVGNLVFTGIFTA |
| | | EMVLKIIAMDPYYYFQEGWNIFDGIIVSLSLMELGL |
| | | SNVEGLSVLRSFRLLRVFKLAKSWPTLNMLIKIIGN |
| | | SVGALGNLTLVLAIIVFIFAVVGMQLFGKSYKECVC |
| | | KINDDCTLPRWHMNDFFHSFLIVFRVLCGEWIETM |
| | | WDCMEVAGQTMCLIVFMLVMVIGNLVVLNLFLAL |
| | | LLSSFSSDNLAATDDDNEMNNLQIAVGRMQKGIDY |
| | | VKNKMRECFQKAFFRKPKVIEIHEGNKIDSCMSNN |
| | | TGIEISKELNYLRDGNGTTSGVGTGSSVEKYVIDEN |
| | | DYMSFINNPSLTVTVPIAVGESDFENLNTEEFSSESE |
| | | LEESKEKLNATSSSEGSTVDVVLPREGEQAETEPEE |
| | | DLKPEACFTEGCIKKFPFCQVSTEEGKGK |
| | | IWWNLRKTCYSIVEHNWFETFIVFMILLSSGALAFE |
| | | DIYIEQRKTIKTMLEYADKVFTYIFILEMLLKWVAY |
| | | GFQTYFTNAWCWLDFLIVDVSLVSLVANALGYSEL |
| | | GAIKSLRTLRALRPLRALSRFEGMRVVVNALVGAIP |
| | | SIMNVLLVCLIFWLIFSIMGVNLFAGKFYHCVNMTT |
| | | GNMFDISDVNNLSDCQALGKQARWKNVKVNFDN |
| | | VGAGYLALLQVATFKGWMDIMYAAVDSRDVKLQ |
| | | PVYEENLYMYLYFVIFIIFGSFFTLNLFIGVIIDNFNQ |
| | | QKKKFGGQDIFMTEEQKKYYNAMKKLGSKKPQKP |
| | | IPRPANKFQGMVFDFVTRQVFDISIMILICLNMVTM |
| | | MVETDDQGKYMTLVLSRINLVFIVLFTGEFVLKLV |
| | | SLRHYYFTIGWNIFDFVVVILSIVGMFLAEMI |
| | | EKYFVSPTLFRVIRLARIGRILRLIKGAKGIRTLLFAL |
| | | MMSLPALFNIGLLLFLVMFIYAIFGMSNFAYVKKE |
| | | AGIDDMFNFETFGNSMICLFQITTSAGWDGLLAPIL |
| | | NSAPPDCDPDTIHPGSSVKGDCGNPSVGIFFFVSYIII |
| | | SFLVVVNMYIAVILENFSVATEESAEPLSEDDFEMF |
| | | YEVWEKFDPDATQFIEFSKLSDFAAALDPPLLIAKP |
| | | NKVQLIAMDLPMVSGDRIHCLDILFAFTKRVLGES |
| | | GEMDALRIQMEDRFMASNPSKVSYEPITTTLKRKQ |
| | | EEVSAAIIQRNFRCYLLKQRLKNISSNYNKEAIKGRI |
| | | DLPIKQDMIIDKLNGNSTPEKTDGSSSTTSPPSYDSV |
| | | TKPDKEKFEKDKPEKESKGKEVRENQK |
| 26 | huNav1.4 (alpha | MARPSLCTLVPLGPECLRPFTRESLAAIEQRAVEEE |
| | subunit) | ARLQRNKQMEIEEPERKPRSDLEAGKNLPMIYGDP |
| | | PPEVIGIPLEDLDPYYSNKKTFIVLNKGKAIFRFSAT |
| | | PALYLLSPFSVVRRGAIKVLIHALFSMFIMITILTNC |
| | | VFMTMSDPPPWSKNVEYTFTGIYTFESLIKILARGF |
| | | CVDDFTFLRDPWNWLDFSVIMMAYLTEFVDLGNIS |
| | | ALRTFRVLRALKTITVIPGLKTIVGALIQSVKKLSDV |
| | | MILTVFCLSVFALVGLQLFMGNLRQKCVRWPPPFN |
| | | DTNTTWYSNDTWYGNDTWYGNEMWYGNDSWY |
| | | ANDTWNSHASWATNDTFDWDAYISDEGNFYFLEG |
| | | SNDALLCGNSSDAGHCPEGYECIKTGRNPNYGYTS |
| | | YDTFSWAFLALFRLMTQDYWENLFQLTLRAAGKT |
| | | YMIFFVVIIFLGSFYLINLILAVVAMAYAEQNEATL |
| | | AEDKEKEEEFQQMLEKFKKHQEELEKAKAAQALE |
| | | GGEADGDPAHGKDCNGSLDTSQGEKGAPRQSSSG |
| | | DSGISDAMEELEEAHQKCPPWWYKCAHKVLIWNC |
| | | CAPWLKFKNIIHLIVMDPFVDLGITICIVLNTLFMA |
| | | MEHYPMTEHFDNVLTVGNLVFTGIFTAEMVLKLIA |
| | | MDPYEYFQQGWNIFDSIIVTLSLVELGLANVQGLSV |
| | | LRSFRLLRVFKLAKSWPTLNMLIKIIGNSVGALGNL |
| | | TLVLAIIVFIFAVVGMQLFGKSYKECVCKIALDCNL |
| | | PRWHMHDFFHSFLIVFRILCGEWIETMWDCMEVA |
| | | GQAMCLTVFLMVMVIGNLVVLNLFLALLLSSFSAD |
| | | SLAASDEDGEMNNLQIAIGRIKLGIGFAKAFLLGLL |
| | | HGKILSPKDIMLSLGEADGAGEAGEAGETAPEDEK |
| | | KEPPEEDLKKDNHILNHMGLADGPPSSLELDHLNFI |
| | | NNPYLTIQVPIASEESDLEMPTEEETDTFSEPEDSKK |
| | | PPQPLYDGNSSVCSTADYKPPEEDPEEQAEENPEGE |
| | | QPEECFTEACVQRWPCLYVDISQGRGKKWWTLRR |
| | | ACFKIVEHNWFETFIVFMILLSSGALAFEDIYIEQRR |
| | | VIRTILEYADKVFTYIFIMEMLLKWVAYGFKVYFT |
| | | NAWCWLDFLIVDVSIISLVANWLGYSELGPIKSLRT |
| | | LRALRPLRALSRFEGMRVVVNALLGAIPSIMNVLL |
| | | VCLIFWLIFSIMGVNLFAGKFYYCINTTTSERFDISE |
| | | VNNKSECESLMHTGQVRWLNVKVNYDNVGLGYL |
| | | SLLQVATFKGWMDIMYAAVDSREKEEQPQYEVNL |
| | | YMYLYFVIFIIFGSFFTLNLFIGVIIDNFNQQKKKLG |
| | | GKDIFMTEEQKKYYNAMKKLGSKKPQKPIPRPQNK |
| | | IQGMVYDLVTKQAFDITIMILICLNMVTMMVETDN |
| | | QSQLKVDILYNINMIFIIIFTGECVLKMLALRQYYFT |
| | | VGWNIFDFVVVILSIVGLALSDLIQKYFVSPTLFRVI |
| | | RLARIGRVLRLIRGAKGIRTLLFALMMSLPALFNIG |
| | | LLLFLVMFIYSIFGMSNFAYVKKESGIDDMFNFETF |
| | | GNSIICLFEITTSAGWDGLLNPILNSGPPDCDPNLEN |
| | | PGTSVKGDCGNPSIGICFFCSYIIISFLIVVNMYIAIIL |
| | | ENFNVATEESSEPLGEDDFEMFYETWEKFDPDATQ |
| | | FIAYSRLSDFVDTLQEPLRIAKPNKIKLITLDLPMVP |
| | | GDKIHCLDILFALTKEVLGDSGEMDALKQTMEEKF |
| | | MAANPSKVSYEPITTTLKRKHEEVCAIKIQRAYRRH |
| | | LLQRSMKQASYMYRHSHDGSGDDAPEKEGLLANT |
| | | MSKMYGHENGNSSSPSPEEKGEAGDAGPTMGLMP |
| | | ISPSDTAWPPAPPPGQTVRPGVKESLV |
| 27 | huNav1.5 (alpha | MANFLLPRGTSSFRRFTRESLAAIEKRMAEKQARG |
| | subunit) | STTLQESREGLPEEEAPRPQLDLQASKKLPDLYGNP |
| | | PQELIGEPLEDLDPFYSTQKTFIVLNKGKTIFRFSAT |
| | | NALYVLSPFHPIRRAAVKILVHSLFNMLIMCTILTN |
| | | CVFMAQHDPPPWTKYVEYTFTAIYTFESLVKILAR |
| | | GFCLHAFTFLRDPWNWLDFSVIIMAYVSENIKLGN |
| | | LSALRTFRVLRALKTISVIPGLKTIVGALIQSVKKLA |
| | | DVMVLTVFCLSVFALIGLQLFMGNLRHKCVRNFTA |
| | | LNGTNGSVEADGLVWESLDLYLSDPENYLLKNGTS |
| | | DVLLCGNSSDAGTCPEGYRCLKAGENPDHGYTSFD |
| | | SFAWAFLALFRLMTQDCWERLYQQTLRSAGKIYMI |
| | | FFMLVIFLGSFYLVNLILAVVAMAYEEQNQATIAET |
| | | EEKEKRFQEAMEMLKKEHEALTIRGVDTVSRSSLE |
| | | MSPLAPVNSHERRSKRRKRMSSGTEECGEDRLPKS |
| | | DSEDGPRAMNHLSLTRGLSRTSMKPRSSRGSIFTFR |
| | | RRDLGSEADFADDENSTAGESESHRTSLLVPWPLR |
| | | RTSAQGQPSPGTSAPGHALHGKKNSTVDCNGVVSL |
| | | LGAGDPEATSPGSHLLRPVMLEHPPDTTTPSEEPGG |
| | | PQMLTSQAPCVDGFEEPGARQRALSAVSVLTSALE |
| | | ELEESRHKCPPCWNRLAQRYLIWECCPLWMSIKQG |
| | | VKLVVMDPFTDLTITMCIVLNTLFMALEHYNMTSE |
| | | FEEMLQVGNLVFTGIFTAEMTFKIIA |
| | | LDPYYYFQQGWNIFDSIIVILSLMELGLSRMSNLSV |
| | | LRSFRLLRVFKLAKSWPTLNTLIKIIGNSVGALGNL |
| | | TLVLAIIVFIFAVVGMQLFGKNYSELRDSDSGLLPR |
| | | WHMMDFFHAFLIIFRILCGEWIETMWDCMEVSGQS |
| | | LCLLVFLLVMVIGNLVVLNLFLALLLSSFSADNLTA |
| | | PDEDREMNNLQLALARIQRGLRFVKRTTWDFCCG |
| | | LLRQRPQKPAALAAQGQLPSCIATPYSPPPPETEKV |
| | | PPTRKETRFEEGEQPGQGTPGDPEPVCVPIAVAESD |
| | | TDDQEEDEENSLGTEEESSKQESQPVSGGPEAPPDS |
| | | RTWSQVSATASSEAEASASQADWRQQWKAEPQAP |
| | | GCGETPEDSCSEGSTADMTNTAELLEQIPDLGQDV |
| | | KDPEDCFTEGCVRRCPCCAVDTTQAPGKVWWRLR |
| | | KTCYHIVEHSWFETFIIFMILLSSGALAFEDIYLEER |
| | | KTIKVLLEYADKMFTYVFVLEMLLKWVAYGFKKY |
| | | FTNAWCWLDFLIVDVSLVSLVANTLGFAEMGPIKS |
| | | LRTLRALRPLRALSRFEGMRVVVNALVGAIPSIMN |
| | | VLLVCLIFWLIFSIMGVNLFAGKFGRCINQTEGDLP |
| | | LNYTIVNNKSQCESLNLTGELYWTKVKVNFDNVG |
| | | AGYLALLQVATFKGWMDIMYAAVDSRGYEEQPQ |
| | | WEYNLYMYIYFVIFIIFGSFFTLNLFIGVIIDNFNQQK |
| | | KKLGGQDIFMTEEQKKYYNAMKKLGSKKPQKPIP |
| | | RPLNKYQGFIFDIVTKQAFDVTIMFLICLN |
| | | MVTMMVETDDQSPEKINILAKINLLFVAIFTGTVLS |
| | | DIIQKYFFSPTLFRVIRLARIGRILRLIRGAKGIRTLLF |
| | | ALMMSLPALFNIGLLLFLVMFIYSIFGMANFAYVK |
| | | WEAGIDDMFNFQTFANSMLCLFQITTSAGWDGLLS |
| | | PILNTGPPYCDPTLPNSNGSRGDCGSPAVGILFFTTY |
| | | IIISFLIVVNMYIAIILENFSVATEESTEPLSEDDFDMF |
| | | YEIWEKFDPEATQFIEYSVLSDFADALSEPLRIAKPN |
| | | QISLINMDLPMVSGDRIHCMDI |
| | | LFAFTKRVLGESGEMDALKIQMEEKFMAANPSKIS |
| | | YEPITTTLRRKHEEVSAMVIQRAFRRHLLQRSLKHA |
| | | SFLFRQQAGSGLSEEDAPEREGLIAYVMSENFSRPL |
| | | GPPSSSSISSTSFPPSYDSVTRATSDNLQVRGSDYSH |
| | | SEDLADFPPSPDRDRESIV |
| 28 | huNav1.6 (alpha | MAARLLAPPGPDSFKPFTPESLANIERRIAESKLKKP |
| | subunit) | PKADGSHREDDEDSKPKPNSDLEAGKSLPFIYGDIP |
| | | QGLVAVPLEDFDPYYLTQKTFVVLNRGKTLFRFSA |
| | | TPALYILSPFNLIRRIAIKILIHSVFSMIIMCTILTNCVF |
| | | MTFSNPPDWSKNVEYTFTGIYTFESLVKIIARGFCID |
| | | GFTFLRDPWNWLDFSVIMMAYITEFVNLGNVSALR |
| | | TFRVLRALKTISVIPGLKTIVGALIQSVKKLSDVMIL |
| | | TVFCLSVFALIGLQLFMGNLRNKCVVWPINFNESY |
| | | LENGTKGFDWEEYINNKTNFYTVPGMLEPLLCGNS |
| | | SDAGQCPEGYQCMKAGRNPNYGYTSFDTFSWAFL |
| | | ALFRLMTQDYWENLYQLTLRAAGKTYMIFFVLVIF |
| | | VGSFYLVNLILAVVAMAYEEQNQATLEEAEQKEA |
| | | EFKAMLEQLKKQQEEAQAAAMATSAGTVSEDAIE |
| | | EEGEEGGGSPRSSSEISKLSSKSAKERRNRRKKRKQ |
| | | KELSEGEEKGDPEKVFKSESEDGMRRKAFRLPDNR |
| | | IGRKFSIMNQSLLSIPGSPFLSRHNSKSSIFSFRGPGR |
| | | FRDPGSENEFADDEHSTVEESEGRRDSLFIPIRARER |
| | | RSSYSGYSGYSQGSRSSRIFPSLRRSVKRNSTVDCN |
| | | GVVSLIGGPGSHIGGRLLPEATTEVEIKKKGPGSLL |
| | | VSMDQLASYGRKDRINSIMSVVTNTLVEELEESQR |
| | | KCPPCWYKFANTFLIWECHPYWIKLKEIVNLIVMD |
| | | PFVDLAITICIVLNTLFMAMEHHPMTPQFEHVLAVG |
| | | NLVFTGIFTAEMFLKLIAMDPYYYFQEGWNIFDGFI |
| | | VSLSLMELSLADVEGLSVLRSFRLLRVFKLAKSWP |
| | | TLNMLIKIIGNSVGALGNLTLVLAIIVFIFAVVGMQL |
| | | FGKSYKECVCKINQDCELPRWHMHDFFHSFLIVFR |
| | | VLCGEWIETMWDCMEVAGQAMCLIVFMMVMVIG |
| | | NLVVLNLFLALLLSSFSADNLAATDDDGEMNNLQI |
| | | SVIRIKKGVAWTKLKVHAFMQAHFKQREADEVKP |
| | | LDELYEKKANCIANHTGADIHRNGDFQKNGNGTTS |
| | | GIGSSVEKYIIDEDHMSFINNPNLTVRVPIAVGESDF |
| | | ENLNTEDVSSESDPEGSKDKLDDTSSSEGSTIDIKPE |
| | | VEEVPVEQPEEYLDPDACFTEGCVQRFKCCQVNIE |
| | | EGLGKSWWILRKTCFLIVEHNWFETFIIFMILLSSGA |
| | | LAFEDIYIEQRKTIRTILEYADKVFTYIFILEMLLKW |
| | | TAYGFVKFFTNAWCWLDFLIVAVSLVSLIANALGY |
| | | SELGAIKSLRTLRALRPLRALSRFEGMRVVVNALV |
| | | GAIPSIMNVLLVCLIFWLIFSIMGVNLFAGKYHYCF |
| | | NETSEIRFEIEDVNNKTECEKLMEGNNTEIRWKNV |
| | | KINFDNVGAGYLALLQVATFKGWMDIMYAAVDSR |
| | | KPDEQPKYEDNIYMYIYFVIFIIFGSFFTLNLFIGVIID |
| | | NFNQQKKKFGGQDIFMTEEQKKYYNAMKKLGSK |
| | | KPQKPIPRPLNKIQGIVFDFVTQQAFDIVIMMLICLN |
| | | MVTMMVETDTQSKQMENILYWINLVFVIFFTCECV |
| | | LKMFALRHYYFTIGWNIFDFVVVILSIVGMFLADIIE |
| | | KYFVSPTLFRVIRLARIGRILRLIKGAKGIRTLLFAL |
| | | MMSLPALFNIGLLLFLVMFIFSIFGMSNFAYVKHEA |
| | | GIDDMFNFETFGNSMICLFQITTSAGWDGLLLPILN |
| | | RPPDCSLDKEHPGSGFKGDCGNPSVGIFFFVSYI |
| | | IISFLIVVNMYIAIILENFSVATEESADPLSEDDFETF |
| | | YEIWEKFDPDATQFIEYCKLADFADALEHPLRVPKP |
| | | NTIELIAMDLPMVSGDRIHCLDILFAFTKRVLGDSG |
| | | ELDILRQQMEERFVASNPSKVSYEPITTTLRRKQEE |
| | | VSAVVLQRAYRGHLARRGFICKKTTSNKLENGGTH |
| | | REKKESTPSTASLPSYDSVTKPEKEKQQRAEEGRRE |
| | | RAKRQKEVRESKC |
| 29 | huNav1.8 (alpha | MEFPIGSLETNNFRRFTPESLVEIEKQIAAKQGTKKA |
| | subunit) | REKHREQKDQEEKPRPQLDLKACNQLPKFYGELPA |
| | | ELIGEPLEDLDPFYSTHRTFMVLNKGRTISRFSATRA |
| | | LWLFSPFNLIRRTAIKVSVHSWFSLFITVTILVNCVC |
| | | MTRTDLPEKIEYVFTVIYTFEALIKILARGFCLNEFT |
| | | YLRDPWNWLDFSVITLAYVGTAIDLRGISGLRTFRV |
| | | LRALKTVSVIPGLKVIVGALIHSVKKLADVTILTIFC |
| | | LSVFALVGLQLFKGNLKNKCVKNDMAVNETTNYS |
| | | SHRKPDIYINKRGTSDPLLCGNGSDSGHCPDGYICL |
| | | KTSDNPDFNYTSFDSFAWAFLSLFRLMTQDSWERL |
| | | YQQTLRTSGKIYMIFFVLVIFLGSFYLVNLILAVVT |
| | | MAYEEQNQATTDEIEAKEKKFQEALEMLRKEQEV |
| | | LAALGIDTTSLHSHNGSPLTSKNASERRHRIKPRVS |
| | | EGSTEDNKSPRSDPYNQRRMSFLGLASGKRRASHG |
| | | SVFHFRSPGRDISLPEGVTDDGVFPGDHESHRGSLL |
| | | LGGGAGQQGPLPRSPLPQPSNPDSRHGEDEHQPPPT |
| | | SELAPGAVDVSAFDAGQKKTFLSAEYLDEPFRAQR |
| | | AMSVVSIITSVLEELEESEQKCPPCLTSLSQKYLIWD |
| | | CCPMWVKLKTILFGLVTDPFAELTITLCIVVNTIFM |
| | | AMEHHGMSPTFEAMLQIGNIVFTIFFTAEMVFKIIAF |
| | | DPYYYFQKKWNIFDCIIVTVSLLELGVAKKGSLSVL |
| | | RSFRLLRVFKLAKSWPTLNTLIKIIGNSVGALGNLTI |
| | | ILAIIVFVFALVGKQLLGENYRNNRKNISAPHEDWP |
| | | RWHMHDFFHSFLIVFRILCGEWIENMWACMEVGQ |
| | | KSICLILFLTVMVLGNLVVLNLFIALLLNSFSADNLT |
| | | APEDDGEVNNLQVALARIQVFGHRTKQALCSFFSR |
| | | SCPFPQPKAEPELVVKLPLSSSKAENHIAANTARGS |
| | | SGGLQAPRGPRDEHSDFIANPTVWVSVPIAEGESDL |
| | | DDLEDDGGEDAQSFQQEVIPKGQQEQLQQVERCG |
| | | DHLTPRSPGTGTSSEDLAPSLGETWKDESVPQVPAE |
| | | GVDDTSSSEGSTVDCLDPEEILRKIPELADDLEEPDD |
| | | CFTEGCIRHCPCCKLDTTKSPWDVGWQVRKTCYRI |
| | | VEHSWFESFIIFMILLSSGSLAFEDYYLDQKPTVKAL |
| | | LEYTDRVFTFIFVFEMLLKWVAYGFKKYFTNAWC |
| | | WLDFLIVNISLISLTAKILEYSEVAPIKALRTLRALRP |
| | | LRALSRFEGMRVVVDALVGAIPSIMNVLLVCLIFW |
| | | LIFSIMGVNLFAGKFWRCINYTDGEFSLVPLSIVNN |
| | | KSDCKIQNSTGSFFWVNVKVNFDNVAMGYLALLQ |
| | | VATFKGWMDIMYAAVDSREVNMQPKWEDNVYM |
| | | YLYFVI |
| | | FIIFGGFFTLNLFVGVIIDNFNQQKKKLGGQDIFMTE |
| | | EQKKYYNAMKKLGSKKPQKPIPRPLNKFQGFVFDI |
| | | VTRQAFDITIMVLICLNMITMMVETDDQSEEKTKIL |
| | | GKINQFFVAVFTGECVMKMFALRQYYFTNGWNVF |
| | | DFIVVVLSIASLIFSAILKSLQSYFSPTLFRVIRLARIG |
| | | RILRLIRAAKGIRTLLFALMMSLPALFNIGLLLFLVM |
| | | FIYSIFGMSSFPHVRWEAGIDDMFNFQTFANSMLCL |
| | | FQITTSAGWDGLLSPILNTGPPYCDPNLPNSNGTRG |
| | | DCGSPAVGIIFFTTYIIISFLIMVNMYIAVILENFNVA |
| | | TEESTEPLSEDDFDMFYETWEKFDPEATQFITFSALS |
| | | DFADTLSGPLRIPKPNRNILIQMDLPLVPGDKIHCLD |
| | | ILFAFTKNVLGESGELDSLKANMEEKFMATNLSKS |
| | | SYEPIATTLRWKQEDISATVIQKAYRSYVLHRSMAL |
| | | SNTPCVPRAEEEAASLPDEGFVAFTANENCVLPDKS |
| | | ETASATSFPPSYESVTRGLSDRVNMRTSSSIQNEDE |
| | | ATSMELIAPGP |
| 30 | F0103262B06 | EVQLVESGGGLVQPGGSLRLSCAGSTRTFSTYAMG |
| | (parental)-FLAG-HIS6 | WFRQAPGREREFVAHINFSGSSTRYADSVKGRFTIS |
| | | RDNAKNMGYLQMNSLKPEDTAVYYCAARWVAGP |
| | | PRYDYEYWGQGTLVTVSSAAADYKDHDGDYKDH |
| | | DIDYKDDDDKGAAHHHHHH |
| 31 | F0103262C02 | EVQLVESGGGLVQAGGSLTLSCAASGLPFGLYILG |
| | (parental)-FLAG-HIS6 | WIRRAPGKERDFVAAISRSGRDTVYANSVKGRFTIS |
| | | RDNAKNMVYLRMDNLRPEDTAAYYCAVDSVPRG |
| | | TPTITESEYAIWGQGTLVTVSSAAADYKDHDGDYK |
| | | DHDIDYKDDDDKGAAHHHHHH |
| 32 | F0103265A11 | EVQLVESGGGLVQPGGSLRLSCAASGMLFNANTQ |
| | (parental)-FLAG-HIS6 | GWYRQAPGKQRELVAFIFSGGYTNYVDSVKGRFTI |
| | | SRDNAKRTMYLQMNSLKPEDSAIYYCSLSRYLGQG |
| | | TLVTVSSAAADYKDHDGDYKDHDIDYKDDDDKG |
| | | AAHHHHHH |
| 33 | F0103265B04 | EVQLVESGGGLVQPGGSLRLSCAAPSFIFSNNYME |
| | (parental)-FLAG-HIS6 | WYRQAPGKQRDWVARITGRGNTNYLDSVKGRFTI |
| | | SRDDAKNTVYLEIDSLKPEDTAVYYCSALWYGGR |
| | | AWGKGTLVTVSSAAADYKDHDGDYKDHDIDYKD |
| | | DDDKGAAHHHHHH |
| 34 | F0103275B05 | EVQLVESGGGLVQPGGSLRLSCAASGSIFNINSMA |
| | (parental)-FLAG-HIS6 | WYRRAPGKQRELVASSTNGGSTNYADSVKGRFTIS |
| | | RDNAKRVYLQMNSLTPEDTAVYYCNALLQPSIYDI |
| | | SRTYWGQGTLVTVSSAAADYKDHDGDYKDHDID |
| | | YKDDDDKGAAHHHHHH |
| 35 | F0103362B08 | EVQLVESGGGLVQAGGSLRLSCAASVRPFSTSAMG |
| | (parental)-FLAG-HIS6 | WFRQAPEKEREAVAGILWNGIVTYYADSVKGRFTI |
| | | SRDNAKNEVYLQMNKLKPEDTAVYYCALDRDYG |
| | | GRSFSAYEYEYWGQGTLVTVSSAAADYKDHDGDY |
| | | KDHDIDYKDDDDKGAAHHHHHH |
| 36 | F0103387G04 | EVQLVESGGGLAQPGGSLRLSCAASGPVFNINKMA |
| | (parental)-FLAG-HIS6 | WYRRAPGKQRELVASVTPTGSISYTDSVKGRFTISR |
| | | DGSKRWSLQMNSLTPEDTAVYYCNALLQPDSYSN |
| | | TRTYWGQGTLVTVSSAAADYKDHDGDYKDHDID |
| | | YKDDDDKGAAHHHHHH |
| 37 | F0103387G05 | EVQLVESGGGLVQAGGSLRLSCDASGRILRIGYMR |
| | (parental)-FLAG-HIS6 | WHRQGAGKQREFVARITDDSATDYADSVKGRFTIS |
| | | RDNAKNTVYLQMNNLNPEDTAVYYCEALVTASVR |
| | | GGSIHSGTYWGRGTLVTVSSAAADYKDHDGDYKD |
| | | HDIDYKDDDDKGAAHHHHHH |
| 38 | F0103454D07 | EVQLVESGGGLVQPGGSLRLSCVASGGIININYIAW |
| | (parental)-FLAG-HIS6 | YRQTPGKQRDLVARISSDDTIKYGDSVKGRFAMSR |
| | | DKVKNMVHLQMNSLTTEDTGVYVCSALITPWTGD |
| | | TRTYWGRGTLVTVSSAAADYKDHDGDYKDHDID |
| | | YKDDDDKGAAHHHHHH |
| 39 | F0103464B09 | EVQLVESGGGLVQPGGSLRLSCATTSRAFIRDVFTG |
| | (parental)-FLAG-HIS6 | WYRRVPGKERELVARIYNGGNTNYADFAKGRFSIS |
| | | RDNAKKMVTLRMSNLKPEDTGVYYCLFSGTINTG |
| | | REYRSGDYWGQGTLVTVSSAAADYKDHDGDYKD |
| | | HDIDYKDDDDKGAAHHHHHH |
| 40 | beta1 (beta1) subunit | MGRLLALVVGAALVSSACGGCVEVDSETEAVYGM |
| | | TFKILCISCKRRSETNAETFTEWTFRQKGTEEFVKIL |
| | | RYENEVLQLEEDERFEGRVVWNGSRGTKDLQDLSI |
| | | FITNVTYNHSGDYECHVYRLLFFENYEHNTSVVKK |
| | | IHIEVVDKANRDMASIVSEIMMYVLIVVLTIWLVAE |
| | | MIYCYKKIAAATETAAQENASEYLAITSESKENCTG |
| | | VQVAE |
| 41 | beta2 (beta2) subunit | MHRDAWLPRPAFSLTGLSLFFSLVPPGRSMEVTVP |
| | | ATLNVLNGSDARLPCTFNSCYTVNHKQFSLNWTY |
| | | QECNNCSEEMFLQFRMKIINLKLERFQDRVEFSGNP |
| | | SKYDVSVMLRNVQPEDEGIYNCYIMNPPDRHRGH |
| | | GKIHLQVLMEEPPERDSTVAVIVGASVGGFLAVVIL |
| | | VLMVVKCVRRKKEQKLSTDDLKTEEEGKTDGEGN |
| | | PDDGAK |
| 42 | beta3 (beta3) subunit | MPAFNRLFPLASLVLIYWVSVCFPVCVEVPSETEAV |
| | | QGNPMKLRCISCMKREEVEATTVVEWFYRPEGGK |
| | | DFLIYEYRNGHQEVESPFQGRLQWNGSKDLQDVSI |
| | | TVLNVTLNDSGLYTCNVSREFEFEAHRPFVKTTRLI |
| | | PLRVTEEAGEDFTSVVSEIMMYILLVFLTLWLLIEMI |
| | | YCYRKVSKAEEAAQENASDYLAIPSENKENSAVPV |
| | | EE |
| 43 | P2A viral peptide | GSGATNFSLLKQAGDVEENPGP |
| 44 | huNav1.7-beta1 | MAMLPPPGPQSFVHFTKQSLALIEQRIAERKSKEPK |
| | | EEKKDDDEEAPKPSSDLEAGKQLPFIYGDIPPGMVS |
| | | EPLEDLDPYYADKKTFIVLNKGKTIFRFNATPALYM |
| | | LSPFSPLRRISIKILVHSLFSMLIMCTILTNCIFMTMN |
| | | NPPDWTKNVEYTFTGIYTFESLVKILARGFCVGEFT |
| | | FLRDPWNWLDFVVIVFAYLTEFVNLGNVSALRTFR |
| | | VLRALKTISVIPGLKTIVGALIQSVKKLSDVMILTVF |
| | | CLSVFALIGLQLFMGNLKHKCFRNSLENNETLESIM |
| | | NTLESEEDFRKYFYYLEGSKDALLCGFSTDSGQCPE |
| | | GYTCVKIGRNPDYGYTSFDTFSWAFLALFRLMTQD |
| | | YWENLYQQTLRAAGKTYMIFFVVVIFLGSFYLINLI |
| | | LAVVAMAYEEQNQANIEEAKQKELEFQQMLDRLK |
| | | KEQEEAEAIAAAAAEYTSIRRSRIMGLSESSSETSKL |
| | | SSKSAKERRNRRKKKNQKKLSSGEEKGDAEKLSKS |
| | | ESEDSIRRKSFHLGVEGHRRAHEKRLSTPNQSPLSIR |
| | | GSLFSARRSSRTSLFSFKGRGRDIGSETEFADDEHSI |
| | | FGDNESRRGSLFVPHRPQERRSSNISQASRSPPMLP |
| | | VNGKMHSAVDCNGVVSLVDGRSALMLPNGQLLPE |
| | | GTTNQIHKKRRCSSYLLSEDMLNDPNLRQRAMSRA |
| | | SILTNTVEELEESRQKCPPWWYRFAHKFLIWNCSPY |
| | | WIKFKKCIYFIVMDPFVDLAITICIVLNTLFMAMEH |
| | | HPMTEEFKNVLAIGNLVFTGIFAAEMVLKLIAMDP |
| | | YEYFQVGWNIFDSLIVTLSLVELFLADVEGLSVLRS |
| | | FRLLRVFKLAKSWPTLNMLIKIIGNSVGALGNLTLV |
| | | LAIIVFIFAVVGMQLFGKSYKECVCKINDDCTLPRW |
| | | HMNDFFHSFLIVFRVLCGEWIETMWDCMEVAGQA |
| | | MCLIVYMMVMVIGNLVVLNLFLALLLSSFSSDNLT |
| | | AIEEDPDANNLQIAVTRIKKGINYVKQTLREFILKAF |
| | | SKKPKISREIRQAEDLNTKKENYISNHTLAEMSKGH |
| | | NFLKEKDKISGFGSSVDKHLMEDSDGQSFIHNPSLT |
| | | VTVPIAPGESDLENMNAEELSSDSDSEYSKVRLNRS |
| | | SSSECSTVDNPLPGEGEEAEAEPMNSDEPEACFTDG |
| | | CVRRFSCCQVNIESGKGKIWWNIRKTCYKIVEHSW |
| | | FESFIVLMILLSSGALAFEDIYIERKKTIKIILEYADKI |
| | | FTYIFILEMLLKWIAYGYKTYFTNAWCWLDFLIVD |
| | | VSLVTLVANTLGYSDLGPIKSLRTLRALRPLRALSR |
| | | FEGMRVVVNALIGAIPSIMNVLLVCLIFWLIFSIMGV |
| | | NLFAGKFYECINTTDGSRFPASQVPNRSECFALMN |
| | | VSQNVRWKNLKVNFDNVGLGYLSLLQVATFKGW |
| | | TIIMYAAVDSVNVDKQPKYEYSLYMYIYFVVFIIFG |
| | | SFFTLNLFIGVIIDNFNQQKKKLGGQDIFMTEEQKK |
| | | YYNAMKKLGSKKPQKPIPRPGNKIQGCIFDLVTNQ |
| | | AFDISIMVLICLNMVTMMVEKEGQSQHMTEVLYWI |
| | | NVVFIILFTGECVLKLISLRHYYFTVGWNIFDFVVVI |
| | | ISIVGMFLADLIETYFVSPTLFRVIRLARIGRILRLVK |
| | | GAKGIRTLLFALMMSLPALFNIGLLLFLVMFIYAIFG |
| | | MSNFAYVKKEDGINDMFNFETFGNSMICLFQITTSA |
| | | GWDGLLAPILNSKPPDCDPKKVHPGSSVEGDCGNP |
| | | SVGIFYFVSYIIISFLVVVNMYIAVILENFSVATEEST |
| | | EPLSEDDFEMFYEVWEKFDPDATQFIEFSKLSDFAA |
| | | ALDPPLLIAKPNKVQLIAMDLPMVSGDRIHCLDILF |
| | | AFTKRVLGESGEMDSLRSQMEERFMSANPSKVSYE |
| | | PITTTLKRKQEDVSATVIQRAYRRYRLRQNVKNISS |
| | | IYIKDGDRDDDLLNKKDMAFDNVNENSSPEKTDAT |
| | | SSTTSPPSYDSVTKPDKEKYEQDRTEKEDKGKDSK |
| | | ESKKSGRGSGATNFSLLKQAGDVEENPGPMGRLLA |
| | | LVVGAALVSSACGGCVEVDSETEAVYGMTFKIL |
| | | CISCKRRSETNAETFTEWTFRQKGTEEFVKILRY |
| | | ENEVLQLEEDERFEGRVVWNGSRGTKDLQDLSI |
| | | FITNVTYNHSGDYECHVYRLLFFENYEHNTSVV |
| | | KKIHIEVVDKANRDMASIVSEIMMYVLIVVLTIW |
| | | LVAEMIYCYKKIAAATETAAQENASEYLAITSES |
| | | KENCTGVQVAE |
| 45 | muNav1.7 | MAMLPPPGPQSFVHFTKQSLALIEQRISEEKAKGHK |
| | | DEKKDDEEEGPKPSSDLEAGKQLPFIYGDIPPGMVS |
| | | EPLEDLDPYYADKKTFIVLNKGKAIFRFNATPALY |
| | | MLSPFSPLRRISIKILVHSLFSMLIMCTILTNCIFMTM |
| | | SNPPDWTKNVEYTFTGIYTFESLIKILARGFCVGEFT |
| | | FLRDPWNWLDFVVIVFAYLTEFVNLGNVSALRTFR |
| | | VLRALKTISVIPGLKTIVGALIQSVKKLSDVMILTVF |
| | | CLSVFALIGLQLFMGNLKHKCFRKDLEQNETLESIM |
| | | STAESEEELKRYFYYLEGSKDALLCGFSTDSGQCPE |
| | | GYECVTAGRNPDYGYTSFDTFGWAFLALFRLMTQ |
| | | DYWENLYQQTLRAAGKTYMIFFVVVIFLGSFYLIN |
| | | LILAVVAMAYEEQNQANIEEAKQKELEFQQMLDR |
| | | LKKEQEEAEAIAAAAAEYTSLGRSRIMGLSESSSET |
| | | SRLSSKSAKERRNRRKKKKQKLSSGEEKGDDEKLS |
| | | KSGSEESIRKKSFHLGVEGHHRAREKRLSTPNQSPL |
| | | SIRGSLFSARRSSRTSLFSFKGRGRDLGSETEFADDE |
| | | HSIFGDNESRRGSLFVPHRPRERRSSNISQASRSPPV |
| | | LPVNGKMHSAVDCNGVVSLVDGPSALMLPNGQLL |
| | | PEVIIDKATSDDSGTTNQMRKKRLSSSYFLSEDMLN |
| | | DPHLRQRAMSRASILTNTVEELEESRQKCPPWWYR |
| | | FAHTFLIWNCSPYWIKFKKFIYFIVMDPFVDLAITICI |
| | | VLNTLFMAMEHHPMTDEFKNVLAVGNLVFTGIFA |
| | | AEMVLKLIAMDPYEYFQVGWNIFDSLIVTLSLVELF |
| | | LADVEGLSVLRSFRLLRVFKLAKSWPTLNMLIKIIG |
| | | NSVGALGNLTLVLAIIVFIFAVVGMQLFGKSYKECV |
| | | CKINENCKLPRWHMNDFFHSFLIVFRVLCGEWIET |
| | | MWDCMEVAGQTMCLIVYMMVMVIGNLVVLNLFL |
| | | ALLLSSFSSDNLTAIEEDTDANNLQIAVARIKRGINY |
| | | VKQTLREFILKSFSKKPKGSKDTKRTADPNNKREN |
| | | YISNRTLAEISKDHNFLKEKDKISGFSSSLDKSFMDE |
| | | NDYQSFIHNPSLTVTVPIAPGESDLENMNTEELSSDS |
| | | DSDYSKERRNRSSSSECSTVDNPLPGEEEAEAEPIN |
| | | ADEPEACFTDGCVRRFPCCQVNIDTGKGKVWWTIR |
| | | KTCYRIVEHSWFESFIVLMILLSSGALAFEDIYIEKK |
| | | KTIKIILEYADKIFTYIFILEMLLKWVAYGYKTYFTN |
| | | AWCWLDFLIVDVSLVTLVANTLGYSDLGPIKSLRT |
| | | LRALRPLRALSRFEGMRVVVNALIGAIPSIMNVLLV |
| | | CLIFWLIFSIMGVNLFAGKFYECVNTTDGSRFSVSQ |
| | | VANRSECFALMNVSGNVRWKNLKVNFDNVGLGY |
| | | LSLLQVATFKGWMDIMYAAVDSVNVNAQPIYEYN |
| | | LYMYIYFVIFIIFGSFFTLNLFIGVIIDNFNQQKKKLG |
| | | GQDIFMTEEQKKYYNAMKKLGSKKPQKPIPRPGNK |
| | | FQGCIFDLVTNQAFDITIMVLICLNMVTMMVEKEG |
| | | QTDYMSFVLYWINVVFIILFTGECVLKLISLRHYYF |
| | | TVGWNIFDFVVVILSIVGMFLAEMIEKYFVSPTLFR |
| | | VIRLARIGRILRLIKGAKGIRTLLFALMMSLPALFNI |
| | | GLLLFLVMFIYAIFGMSNFAYVKKEAGINDMFNFE |
| | | TFGNSMICLFQITTSAGWDGLLAPILNSAPPDCDPK |
| | | KVHPGSSVEGDCGNPSVGIFYFVSYIIISFLVVVNM |
| | | YIAVILENFSVATEESTEPLSEDDFEMFYEVWEKFD |
| | | PDATQFIEFCKLSDFAAALDPPLLIAKPNKVQLIAM |
| | | DLPMVSGDRIHCLDILFAFTKRVLGESGEMDSLRSQ |
| | | MEERFMSANPSKVSYEPITTTLKRKQEDVSATIIQR |
| | | AYRRYRLRQNVKNISSIYIKDGDRDDDLPNKEDIVF |
| | | DNVNENSSPEKTDATASTISPPSYDSVTKPDQEKYE |
| | | TDKTEKEDKEKDESRK |
| 46 | F0103262B06 (parental) | EVQLVESGGGLVQPGGSLRLSCAGSTRTFSTYAMG |
| | | WFRQAPGREREFVAHINFSGSSTRYADSVKGRFTIS |
| | | RDNAKNMGYLQMNSLKPEDTAVYYCAARWVAGP |
| | | PRYDYEYWGQGTLVTVSS |
| 47 | F0103262C02 (parental) | EVQLVESGGGLVQAGGSLTLSCAASGLPFGLYILG |
| | | WIRRAPGKERDFVAAISRSGRDTVYANSVKGRFTIS |
| | | RDNAKNMVYLRMDNLRPEDTAAYYCAVDSVPRG |
| | | TPTITESEYAIWGQGTLVTVSS |
| 48 | F0103265A11 (parental) | EVQLVESGGGLVQPGGSLRLSCAASGMLFNANTQ |
| | | GWYRQAPGKQRELVAFIFSGGYTNYVDSVKGRFTI |
| | | SRDNAKRTMYLQMNSLKPEDSAIYYCSLSRYLGQG |
| | | TLVTVSS |
| 49 | F0103265B04 (parental) | EVQLVESGGGLVQPGGSLRLSCAAPSFIFSNNYME |
| | | WYRQAPGKQRDWVARITGRGNTNYLDSVKGRFTI |
| | | SRDDAKNTVYLEIDSLKPEDTAVYYCSALWYGGR |
| | | AWGKGTLVTVSS |
| 50 | F0103275B05 (parental) | EVQLVESGGGLVQPGGSLRLSCAASGSIFNINSMA |
| | | WYRRAPGKQRELVASSTNGGSTNYADSVKGRFTIS |
| | | RDNAKRVYLQMNSLTPEDTAVYYCNALLQPSIYDI |
| | | SRTYWGQGTLVTVSS |
| 51 | F0103362B08 (parental) | EVQLVESGGGLVQAGGSLRLSCAASVRPFSTSAMG |
| | | WFRQAPEKEREAVAGILWNGIVTYYADSVKGRFTI |
| | | SRDNAKNEVYLQMNKLKPEDTAVYYCALDRDYG |
| | | GRSFSAYEYEYWGQGTLVTVSS |
| 52 | F0103387G04 (parental) | EVQLVESGGGLAQPGGSLRLSCAASGPVFNINKMA |
| | | WYRRAPGKQRELVASVTPTGSISYTDSVKGRFTISR |
| | | DGSKRWSLQMNSLTPEDTAVYYCNALLQPDSYSN |
| | | TRTYWGQGTLVTVSS |
| 53 | F0103387G05 (parental) | EVQLVESGGGLVQAGGSLRLSCDASGRILRIGYMR |
| | | WHRQGAGKQREFVARITDDSATDYADSVKGRFTIS |
| | | RDNAKNTVYLQMNNLNPEDTAVYYCEALVTASVR |
| | | GGSIHSGTYWGRGTLVTVSS |
| 54 | F0103454D07 (parental) | EVQLVESGGGLVQPGGSLRLSCVASGGIININYIAW |
| | | YRQTPGKQRDLVARISSDDTIKYGDSVKGRFAMSR |
| | | DKVKNMVHLQMNSLTTEDTGVYVCSALITPWTGD |
| | | TRTYWGRGTLVTVSS |
| 55 | F0103464B09 (parental) | EVQLVESGGGLVQPGGSLRLSCATTSRAFIRDVFTG |
| | | WYRRVPGKERELVARIYNGGNTNYADFAKGRFSIS |
| | | RDNAKKMVTLRMSNLKPEDTGVYYCLFSGTINTG |
| | | REYRSGDYWGQGTLVTVSS |
| 56 | FLAG-HIS6 peptide | AAADYKDHDGDYKDHDIDYKDDDDKGAAHHHH |
| | | HH |
| 57 | human VH3-JH | EVQLVESGGGLVQPGGSLRLSCAASGFTFSSYAMH |
| | consensus (amino acids | WVRQAPGKGLEWVSVISSSGSSTYYADSVKGRFTI |
| | Xaa99-Xaal 14 are each | SRDNSKNTLYLQMNSLRAEDTAVYYCARXXXXXX |
| | independently any | XXXXXXXXXXWGQGTLVTVSS |
| | amino acid except Cys) | |
| 58 | VHH2-consensus | QVQLVESGGGLVQAGGSLRLSCAASGSIFSINAMG |
| | | WYRQAPGKQRELVAAITSGGSTNYADSVKGRFTIS |
| | | RDNAKNTLYLQMNSLKPEDTAVYYCNA |
| 59 | F0103387G04_SO | DVQLVESGGGVVQPGGSLRLSCAASGPVFNINRMAWY |
| | | RQAPGKQRELVAYVTPTGDISYADSVKGRFTISDDGSKR |
| | | VSLQMNSLRPEDTALYYCRALLQPSSYSGTRTYWGQGT |
| | | LVTVSS |
| 60 | F0103387G05_SO | DVQLVESGGGVVQPGGSLRLSCAASGRILRIGYMRWYR |
| | | QAPGKQREFVARITGGSATGYADSVKGRFTISRDNAKN |
| | | TVYLQMNSLRPEDTALYYCEALVTASVRGGSIHSGTYW |
| | | GQGTLVTVSS |
| 61 | F0103464B09_SO | DVQLVESGGGVVQPGGSLRLSCAASHRAFIRDVFTGWY |
| | | RQAPGKQRELVARIYEGGNTQYADFAKGRFSISRDNAK |
| | | KTVYLQMNSLRAEDTALYYCLFSGTISTGREYRSGDYW |
| | | GQGTLVTVSS |
| 62 | Nav1.7 alpha epitope | FRNSLENNETLESIMNTLESEEDFRKYFYYLEGSKD |
| | | ALLCGFSTDSGQCPEGYTCV |
| 63 | Nav1.7 alpha Domain I | MAMLPPPGPQSFVHFTKQSLALIEQRIAERKSKEPK |
| | | EEKKDDDEEAPKPSSDLEAGKQLPFIYGDIPPGMVS |
| | | EPLEDLDPYYADKKTFIVLNKGKTIFRFNATPALYM |
| | | LSPFSPLRRISIKILVHSLFSMLIMCTILTNCIFMTMN |
| | | NPPDWTKNVEYTFTGIYTFESLVKILARGFCVGEFT |
| | | FLRDPWNWLDFVVIVFAYLTEFVNLGNVSALRTFR |
| | | VLRALKTISVIPGLKTIVGALIQSVKKLSDVMILTVF |
| | | CLSVFALIGLQLFMGNLKHKCFRNSLENNETLESIM |
| | | NTLESEEDFRKYFYYLEGSKDALLCGFSTDSGQCPE |
| | | GYTCVKIGRNPDYGYTSFDTFSWAFLALFRLMTQD |
| | | YWENLYQQTLRAAGKTYMIFFVVVIFLGSFYLINLI |
| | | LAVVAMAYEEQNQANIEEAKQKELEFQQMLDRLK |
| | | KEQEEAEAIAAAAAEYTSIRRSRIMGLSESSSETSKL |
| | | SSKSAKERRNRRKKKNQKKLSSGEEKGDAEKLSKS |
| | | ESEDSIRRKSFHLGVEGHRRAHEKRLSTPNQSPLSIR |
| | | GSLFSARRSSRTSLFSFKGRGRDIGSETEFADDEHSI |
| | | FGDNESRRGSLFVPHRPQERRSSNISQASRSPPMLP |
| | | VNGKMHSAVDCNGVVSLVDGRSALMLPNGQLLPE |
| | | VIIDKATSDDSGTTNQIHKKRRCSSYLLSEDMLNDP |
| | | NLRQRAMSRASILTNTVEELEESRQKCPPWWYRFA |
| | | HKFLIWNCSPYWIKFKKCIY |
| 64 | Nav1.7alpha Domain I | KHKCFRNSLENNETLESIMNTLESEEDFRKYFYYLE |
| | S5-S6 loop | GSKDALLCGFSTDSGQCPEGYTCVKIGRNPDYGYT |
| | | SFDTFSWAFLALFRLMTQDYWENLYQQTLRAAGK |
| | | TY |
| 65 | Nav1.7 alpha Exon 5N | YLTEFVNLGNVS |
| 66 | Nav1.7 alpha Exon 5A | YVTEFVDLGNVS |
| 67 | Nav1.7 alpha Exon 11S | LPNGQLLPE |
| 68 | Nav1.7 alpha Exon 11L | LPNGQLLPEVIIDKATSDDS |
| 69 | >F010301461 | EVQLVESGGGLVQPGGSLRLSCAASGSIFNINRMA |
| | F0103275B05(S33R, S50Y, | WYRRAPGKQRELVAYSTNGGDTNYADSVKGRFTI |
| | S56D, N93R) | SRDNAKRVYLQMNSLTPEDTAVYYCRALLQPSIYD |
| | | ISRTYWGQGTLVTVSS |
| 70 | >F010301635 | EVQLVESGGGVVQPGGSLRLSCAASGSIFNINSMA |
| | F0103275B05(L11V, R39Q, | WYRQAPGKQRELVASSTNGGSTNYADSVKGRFTIS |
| | T83R, V89L) | RDNAKRVYLQMNSLRPEDTALYYCNALLQPSIYDI |
| | | SRTYWGQGTLVTVSS |
| 71 | >F010301636 | EVQLVESGGGVVQPGGSLRLSCAASGSIFNINSMA |
| | F0103275B05(L11V ,R76N, | WYRRAPGKQRELVASSTNGGSTNYADSVKGRFTIS |
| | T83R, V89L) | RDNAKNVYLQMNSLRPEDTALYYCNALLQPSIYDI |
| | | SRTYWGQGTLVTVSS |
| 72 | >F010301637 | EVQLVESGGGVVQPGGSLRLSCAASGSIFNINSMA |
| | F0103275B05(L11V, T83R, | WYRRAPGKQRELVASSTNGGSTNYADSVKGRFTIS |
| | V89L) | RDNAKRVYLQMNSLRPEDTALYYCNALLQPSIYDI |
| | | SRTYWGQGTLVTVSS |
| 73 | >F010301638 | EVQLVESGGGVVQPGGSLRLSCAASGSIFNINSMA |
| | F0103275B05(L11V, R39Q, | WYRQAPGKQRELVASSTNGGSTNYADSVKGRFTIS |
| | R76N, T83R, V89L) | RDNAKNVYLQMNSLRPEDTALYYCNALLQPSIYDI |
| | | SRTYWGQGTLVTVSS |
| 74 | >F010301639 | EVQLVESGGGVVQPGGSLRLSCAASGSIFNINSMA |
| | F0103275B05(R76_V78 | WYRQAPGKQRELVASSTNGGSTNYADSVKGRFTIS |
| | insT)(L11V, R39Q, T83R, | RDNAKRTVYLQMNSLRPEDTALYYCNALLQPSIYD |
| | V89L) | ISRTYWGQGTLVTVSS |
| 75 | >F010301640 | EVQLVESGGGVVQPGGSLRLSCAASGSIFNINSMA |
| | F0103275B05(R76_V78 | WYRRAPGKQRELVASSTNGGSTNYADSVKGRFTIS |
| | insT)(L11V, T83R, V89L) | RDNAKRTVYLQMNSLRPEDTALYYCNALLQPSIYD |
| | | ISRTYWGQGTLVTVSS |
| 76 | >F010301641 | EVQLVESGGGVVQPGGSLRLSCAASGSIFNINSMA |
| | F0103275B05(R76_V78 | WYRRAPGKQRELVASSTNGGSTNYADSVKGRFTIS |
| | insT)(L11V, R76N, T83R, | RDNAKNTVYLQMNSLRPEDTALYYCNALLQPSIYD |
| | V89L) | ISRTYWGQGTLVTVSS |
| 77 | >F010301642 | EVQLVESGGGVVQPGGSLRLSCAASGSIFNINSMA |
| | F0103275B05(R76_V78 | WYRQAPGKQRELVASSTNGGSTNYADSVKGRFTIS |
| | insT)(L11V, R39Q, R76N, | RDNAKNTVYLQMNSLRPEDTALYYCNALLQPSIYD |
| | T83R, V89L) | ISRTYWGQGTLVTVSS |
| 78 | >F010301652 | EVQLVESGGGVVQPGGSLRLSCAASGSIFNINRMA |
| | F0103275B05(L11V, S33R, | WYRRAPGKQRELVAYSTNGGDTNYADSVKGRFTI |
| | S50Y, S56D, R76N, T83R, | SRDNAKNVYLQMNSLRPEDTALYYCRALLQPSIYD |
| | V89L, N93R) | ISRTYWGQGTLVTVSS |
| 79 | >F010301653 | EVQLVESGGGVVQPGGSLRLSCAASGSIFNINRMA |
| | F0103275B05(L11V, S33R, | WYRRAPGKQRELVAYSTNGGDTNYADSVKGRFTI |
| | S50Y, S56D, T83R, V89L, | SRDNAKRVYLQMNSLRPEDTALYYCRALLQPSIYD |
| | N93R) | ISRTYWGQGTLVTVSS |
| 80 | >F010301654 | EVQLVESGGGVVQPGGSLRLSCAASGSIFNINRMA |
| | F0103275B05(L11V, S33R, | WYRQAPGKQRELVAYSTNGGDTNYADSVKGRFTI |
| | R39Q, S50Y, S56D, T83R, | SRDNAKRVYLQMNSLRPEDTALYYCRALLQPSIYD |
| | V89L, N93R) | ISRTYWGQGTLVTVSS |
| 81 | >F010301655 | EVQLVESGGGVVQPGGSLRLSCAASGSIFNINRMA |
| | F0103275B05(L11V, S33R, | WYRQAPGKQRELVAYSTNGGDTNYADSVKGRFTI |
| | R39Q, S50Y, S56D, R76N, | SRDNAKNVYLQMNSLRPEDTALYYCRALLQPSIYD |
| | T83R, V89L, N93R) | ISRTYWGQGTLVTVSS |
| 82 | >F010301556 | EVQLVESGGGLVQAGGSLRLSCAASGRILRIGYMR |
| | F0103387G05(D23A, D53G, | WHRQGAGKQREFVARITGGSATGYADSVKGRFTIS |
| | D54G, D58G) | RDNAKNTVYLQMNNLNPEDTAVYYCEALVTASVR |
| | | GGSIHSGTYWGRGTLVTVSS |
| 83 | >F010301563 | EVQLVESGGGLVQAGGSLRLSCAASGRILRIGYMR |
| | F0103387G05(D23A, D58G) | WHRQGAGKQREFVARITDDSATGYADSVKGRFTIS |
| | | RDNAKNTVYLQMNNLNPEDTAVYYCEALVTASVR |
| | | GGSIHSGTYWGRGTLVTVSS |
| 84 | >F010301849 | EVQLVESGGGVVQPGGSLRLSCAASGRILRIGYMR |
| | F0103387G05(L11V, A14P, | WHRQAPGKQREFVARITDDSATGYADSVKGRFTIS |
| | D23A, G40A, A41P, D58G, | RDNAKNTVYLQMNSLRPEDTALYYCEALVTASVR |
| | N82bS, N83R, V89L, | GGSIHSGTYWGQGTLVTVSS |
| | R105Q) | |
| 85 | >F010301850 | EVQLVESGGGVVQPGGSLRLSCAASGRILRIGYMR |
| | F0103387G05(L11V, A14P, | WYRQAPGKQREFVARITDDSATGYADSVKGRFTIS |
| | D23A, H37Y, G40A, | RDNAKNTVYLQMNSLRPEDTALYYCEALVTASVR |
| | A41P, D58G, N82bS, N83R, | GGSIHSGTYWGQGTLVTVSS |
| | V89L, R105Q) | |
| 86 | >F010301643 | EVQLVESGGGVVQPGGSLRLSCAASGRILRIGYMR |
| | F0103387G05(L11V, A14P, | WHRQGAGKQREFVARITDDSATDYADSVKGRFTIS |
| | D23A, N82bS, N83R, | RDNAKNTVYLQMNSLRPEDTALYYCEALVTASVR |
| | V89L, R105Q) | GGSIHSGTYWGQGTLVTVSS |
| 87 | >F010301644 | EVQLVESGGGVVQPGGSLRLSCDASGRILRIGYMR |
| | F0103387G05(L11V, A14P, | WYRQGAGKQREFVARITDDSATDYADSVKGRFTIS |
| | H37Y, N82bS, N83R, | RDNAKNTVYLQMNSLRPEDTALYYCEALVTASVR |
| | V89L, R105Q) | GGSIHSGTYWGQGTLVTVSS |
| 88 | >F010301645 | EVQLVESGGGVVQPGGSLRLSCDASGRILRIGYMR |
| | F0103387G05(L11V, A14P, | WHRQAAGKQREFVARITDDSATDYADSVKGRFTIS |
| | G40A, N82bS, N83R, | RDNAKNTVYLQMNSLRPEDTALYYCEALVTASVR |
| | V89L, R105Q) | GGSIHSGTYWGQGTLVTVSS |
| 89 | >F010301646 | EVQLVESGGGVVQPGGSLRLSCDASGRILRIGYMR |
| | F0103387G05(L11V, A14P, | WHRQGPGKQREFVARITDDSATDYADSVKGRFTIS |
| | A41P, N82bS, N83R, | RDNAKNTVYLQMNSLRPEDTALYYCEALVTASVR |
| | V89L, R105Q) | GGSIHSGTYWGQGTLVTVSS |
| 90 | >F010301647 | EVQLVESGGGVVQPGGSLRLSCDASGRILRIGYMR |
| | F0103387G05(L11V, A14P, | WHRQGAGKQRELVARITDDSATDYADSVKGRFTIS |
| | F47L, N82bS, N83R, | RDNAKNTVYLQMNSLRPEDTALYYCEALVTASVR |
| | V89L, R105Q) | GGSIHSGTYWGQGTLVTVSS |
| 91 | >F010301648 | EVQLVESGGGVVQPGGSLRLSCDASGRILRIGYMR |
| | F0103387G05(L11V, A14P, | WHRQGAGKQREFVARITDDSATDYADSVKGRFTIS |
| | N82bS, N83R, V89L, | RDNAKNTVYLQMNSLRPEDTALYYCNALVTASVR |
| | E93N, R105Q) | GGSIHSGTYWGQGTLVTVSS |
| 92 | >F010301649 | EVQLVESGGGVVQPGGSLRLSCDASGRILRIGYMR |
| | F0103387G05(L11V, A14P, | WHRQGAGKQREFVARITDDSATDYADSVKGRFTIS |
| | N82bS, N83R, V89L, | RDNAKNTVYLQMNSLRPEDTALYYCEALVTASVR |
| | R105Q) | GGSIHSGTYWGQGTLVTVSS |
| 93 | >F010302307 | EVQLVESGGGVVQPGGSLRLSCAASGRILRIGYMR |
| | F0103387G05(L11V, A14P, | WYRQAPGKQREFVARITDDSATGYADSVKGRFTIS |
| | D23A, H37Y, G40A, | RDAAKNTVYLQMNSLRPEDTALYYCEALVTASVR |
| | A41P, D58G, N73A, N82bS, | GGSIHSGTYWGQGTLVTVSS |
| | N83R, V89L, R105Q) | |
| 94 | >F010302308 | EVQLVESGGGVVQPGGSLRLSCAASGRILRIGYMR |
| | F0103387G05(L11V, A14P, | WYRQAPGKQREFVARITDDSATGYADSVKGRFTIS |
| | D23A, H37Y, G40A, | RDYAKNTVYLQMNSLRPEDTALYYCEALVTASVR |
| | A41P, D58G, N73Y, N82bS, | GGSIHSGTYWGQGTLVTVSS |
| | N83R, V89L, R105Q) | |
| 95 | >F010302309 | EVQLVESGGGVVQPGGSLRLSCAASGRILRIGYMR |
| | F0103387G05(L11V, A14P, | WYRQAPGKQREFVARITDDSATGYADSVKGRFTIS |
| | D23A, H37Y, G40A, | RDQAKNTVYLQMNSLRPEDTALYYCEALVTASVR |
| | A41P, D58G, N73Q, N82bS, | GGSIHSGTYWGQGTLVTVSS |
| | N83R, V89L, R105Q) | |
| 96 | >F010302391 | EVQLVESGGGVVQPGGSLRLSCAASGRILRIGYMR |
| | F0103387G05(L11V, A14P, | WYRQAPGKQREFVARITGGSATGYADSVKGRFTIS |
| | D23A, H37Y, G40A, | RDNAKNTVYLQMNSLRPEDTALYYCEALVTASVR |
| | A41P,D53G, D54G, D58G, | GGSIHSGTYWGQGTLVTVSS |
| | N82bS, N83R, V89L, | |
| | R105Q) | |
| 97 | >F010302392 | EVQLVESGGGVVQPGGSLRLSCAASGRILRIGYMR |
| | F0103387G05(L11V, A14P, | WYRQAPGKQREFVARITGGSATGYADSVKGRFTIS |
| | D23A, H37Y, G40A, | RDQAKNTVYLQMNSLRPEDTALYYCEALVTASVR |
| | A41P, D53G, D54G, D58G, | GGSIHSGTYWGQGTLVTVSS |
| | N73Q, N82bS, N83R, | |
| | V89L, R105Q) | |
| 98 | >F010301868 | EVQLVESGGGVVQPGGSLRLSCATTSRAFIRDVFTG |
| | F0103464B09(L11V, S68T, | WYRRVPGKERELVARIYNGGNTNYADFAKGRFTIS |
| | T79Y, R81Q, S82aN, | RDNAKKMVYLQMNSLRPEDTALYYCLFSGTINTG |
| | N82bS, K83R, G88A, | REYRSGDYWGQGTLVTVSS |
| | V89L) | |
| 99 | >F010301869 | EVQLVESGGGVVQPGGSLRLSCATTSRAFIRDVFTG |
| | F0103464B09(L11V, S68T, | WYRRVPGKERELVARIYNGGNTNY |
| | M77T, T79Y, R81Q, | ADFAKGRFTISRDNAKKTVYLQMNSLRPEDTALYY |
| | S82aN, N82bS, K83R, G88A, | CLFSGTINTGREYRSGDYWGQGTLVTVSS |
| | V89L) | |
| 100 | >F010301870 | EVQLVESGGGVVQPGGSLRLSCATTSRAFIRDVFTG |
| | F0103464B09(L11V, S68T, | WYRRVPGKERELVARIYNGGNTNYADFAKGRFTIS |
| | T79Y, R81Q, S82aN, | RDNAKKMVYLQMNSLRPEDTALYYCNFSGTINTG |
| | N82bS, K83R, G88A, V89L, | REYRSGDYWGQGTLVTVSS |
| | L93N) | |
| 101 | >F010301871 | EVQLVESGGGVVQPGGSLRLSCAATSRAFIRDVFT |
| | F0103464B09(L11V, T24A, | GWYRRVPGKERELVARIYNGGNTNYADFAKGRFT |
| | S68T, T79Y, R81Q, | ISRDNAKKMVYLQMNSLRPEDTALYYCLFSGTINT |
| | S82aN, N82bS, K83R, | GREYRSGDYWGQGTLVTVSS |
| | AG88, V89L) | |
| 102 | >F010301872 | EVQLVESGGGVVQPGGSLRLSCATSSRAFIRDVFTG |
| | F0103464B09(L11V, T25S, | WYRRVPGKERELVARIYNGGNTNYADFAKGRFTIS |
| | S68T, T79Y, R81Q, | RDNAKKMVYLQMNSLRPEDTALYYCLFSGTINTG |
| | S82aN, N82bS, K83R, | REYRSGDYWGQGTLVTVSS |
| | G88A, V89L) | |
| 103 | >F010301873 | EVQLVESGGGVVQPGGSLRLSCATTSRAFIRDVFTG |
| | F0103464B09(L11V, R39Q, | WYRQVPGKERELVARIYNGGNTNYADFAKGRFTIS |
| | S68T, T79Y, R81Q, | RDNAKKMVYLQMNSLRPEDTALYYCLFSGTINTG |
| | S82aN, N82bS, K83R, | REYRSGDYWGQGTLVTVSS |
| | G88A, V89L) | |
| 104 | >F010301874 | EVQLVESGGGVVQPGGSLRLSCATTSRAFIRDVFTG |
| | F0103464B09(L11V, V40A, | WYRRAPGKERELVARIYNGGNTNYADFAKGRFTIS |
| | S68T, T79Y, R81Q, | RDNAKKMVYLQMNSLRPEDTALYYCLFSGTINTG |
| | S82aN, N82bS, K83R, | REYRSGDYWGQGTLVTVSS |
| | G88A, V89L) | |
| 105 | >F010301875 | EVQLVESGGGVVQPGGSLRLSCATTSRAFIRDVFTG |
| | F0103464B09(L11V, F62S, | WYRRVPGKERELVARIYNGGNTNYADSAKGRFTIS |
| | S68T, T79Y, R81Q, | RDNAKKMVYLQMNSLRPEDTALYYCLFSGTINTG |
| | S82aN, N82bS, K83R, | REYRSGDYWGQGTLVTVSS |
| | G88A, V89L) | |
| 106 | >F010301876 | EVQLVESGGGVVQPGGSLRLSCATTSRAFIRDVFTG |
| | F0103464B09(L11V, A63V, | WYRRVPGKERELVARIYNGGNTNYADFVKGRFTIS |
| | S68T, T79Y, R81Q, | RDNAKKMVYLQMNSLRPEDTALYYCLFSGTINTG |
| | S82aN, N82bS, K83R, | REYRSGDYWGQGTLVTVSS |
| | G88A, V89L) | |
| 107 | >F010301877 | EVQLVESGGGVVQPGGSLRLSCATTSRAFIRDVFTG |
| | F0103464B09(L11V, S68T, | WYRRVPGKERELVARIYNGGNTNYADFAKGRFTIS |
| | K76N, T79Y, R81Q, | RDNAKNMVYLQMNSLRPEDTALYYCLFSGTINTG |
| | S82aN, N82bS, K83R, | REYRSGDYWGQGTLVTVSS |
| | G88A, V89L) | |
| 108 | >F010301892 | EVQLVESGGGLVQPGGSLRLSCATTSRAFIRDLFTG |
| | F0103464B09(V33L) | WYRRVPGKERELVARIYNGGNTNYADFAKGRFSIS |
| | | RDNAKKMVTLRMSNLKPEDTGVYYCLFSGTINTG |
| | | REYRSGDYWGQGTLVTVSS |
| 109 | >F010301893 | EVQLVESGGGVVQPGGSLRLSCATTSRAFIRDVFTG |
| | F0103464B09(L11V, E44Q, | WYRRVPGKQRELVARIYNGGNTNYADFAKGRFTIS |
| | S68T, T79Y, R81Q, | RDNAKKMVYLQMNSLRPEDTALYYCLFSGTINTG |
| | S82aN, N82bS, K83R, | REYRSGDYWGQGTLVTVSS |
| | G88A, V89L) | |
| 110 | >F010301932 | EVQLVESGGGVVQPGGSLRLSCATTSRAFIRDVFTG |
| | F0103464B09(L11V, K83R, | WYRRVPGKERELVARIYNGGNTNYADFAKGRFSIS |
| | V89L) | RDNAKKMVTLRMSNLRPEDTGLYYCLFSGTINTGR |
| | | EYRSGDYWGQGTLVTVSS |
| 111 | >F010301933 | EVQLVESGGGVVQPGGSLRLSCATTSRAFIRDVFTG |
| | F0103464B09(L11V, S68T, | WYRRVPGKERELVARIYNGGNTNYADFAKGRFTIS |
| | K83R, V89L) | RDNAKKMVTLRMSNLRPEDTGLYYCLFSGTINTGR |
| | | EYRSGDYWGQGTLVTVSS |
| 112 | >F010301934 | EVQLVESGGGVVQPGGSLRLSCATTSRAFIRDVFTG |
| | F0103464B09(L11V, M77T, | WYRRVPGKERELVARIYNGGNTNYADFAKGRFSIS |
| | K83R, V89L) | RDNAKKTVTLRMSNLRPEDTGLYYCLFSGTINTGR |
| | | EYRSGDYWGQGTLVTVSS |
| 113 | >F010301935 | EVQLVESGGGVVQPGGSLRLSCATTSRAFIRDVFTG |
| | F0103464B09(L11V, T79Y, | WYRRVPGKERELVARIYNGGNTNYADFAKGRFSIS |
| | K83R, V89L) | RDNAKKMVYLRMSNLRPEDTGLYYCLFSGTINTG |
| | | REYRSGDYWGQGTLVTVSS |
| 114 | >F010301936 | EVQLVESGGGVVQPGGSLRLSCATTSRAFIRDVFTG |
| | F0103464B09(L11V, R81Q, | WYRRVPGKERELVARIYNGGNTNYADFAKGRFSIS |
| | K83R, V89L) | RDNAKKMVTLQMSNLRPEDTGLYYCLFSGTINTGR |
| | | EYRSGDYWGQGTLVTVSS |
| 115 | >F010301937 | EVQLVESGGGVVQPGGSLRLSCATTSRAFIRDVFTG |
| | F0103464B09(L11V, S82aN, | WYRRVPGKERELVARIYNGGNTNYADFAKGRFSIS |
| | K83R, V89L) | RDNAKKMVTLRMNNLRPEDTGLYYCLFSGTINTG |
| | | REYRSGDYWGQGTLVTVSS |
| 116 | >F010301938 | EVQLVESGGGVVQPGGSLRLSCATTSRAFIRDVFTG |
| | F0103464B09(L11V, N82bS, | WYRRVPGKERELVARIYNGGNTNYADFAKGRFSIS |
| | K83R, V89L) | RDNAKKMVTLRMSSLRPEDTGLYYCLFSGTINTGR |
| | | EYRSGDYWGQGTLVTVSS |
| 117 | >F010301939 | EVQLVESGGGVVQPGGSLRLSCATTSRAFIRDVFTG |
| | F0103464B09(L11V, K83R, | WYRRVPGKERELVARIYNGGNTNYADFAKGRFSIS |
| | G88A, V89L) | RDNAKKMVTLRMSNLRPEDTALYYCLFSGTINTGR |
| | | EYRSGDYWGQGTLVTVSS |
| 118 | >F010302333 | EVQLVESGGGVVQPGGSLRLSCAASSRQFIRDVFT |
| | F0103464B09(L11V, T24A, | GWYRRAPGKQRELVARIYNEGNTNYADSAKGRFT |
| | T25S, A28Q, V40A, | ISRDNAKKTVYLQMNSLRPEDTALYYCLFSGTISTG |
| | E44Q, G54E, F62S, S68T, | REYRSGDYWGQGTLVTVSS |
| | M77T, T79Y, R81Q, S82aN, | |
| | N82bS, K83R, G88A, | |
| | V89L, N99S) | |
| 119 | >F010302334 | EVQLVESGGGVVQPGGSLRLSCAASSRQFIRDVFT |
| | F0103464B09(L11V, T24A, | GWYRRAPGKQRELVARIYNEGNTQYADSAKGRFT |
| | T25S, A28Q, V40A, | ISRDNAKKTVYLQMNSLRPEDTALYYCLFSGTISTG |
| | E44Q, G54E, N58Q, F62S, | REYRSGDYWGQGTLVTVSS |
| | S68T, M77T, T79Y, R81Q, | |
| | S82aN, N82bS, K83R, | |
| | G88A, V89L, N99S) | |
| 120 | >F010302335 | EVQLVESGGGVVQPGGSLRLSCAASSRQFIRDVFT |
| | F0103464B09(L11V, T24A, | GWYRRAPGKQRELVARIYESGNTQYADSAKGRFTI |
| | T25S, A28Q, V40A, | SRDNAKKTVYLQMNSLRPEDTALYYCLFSGTISTG |
| | E44Q, N53E, G54S, N58Q, | REYRSGDYWGQGTLVTVSS |
| | F62S, S68T, M77T, T79Y, | |
| | R81Q, S82aN, N82bS, | |
| | K83R, G88A, V89L, | |
| | N99S) | |
| 121 | >F010302336 | EVQLVESGGGVVQPGGSLRLSCAASHRQFIRDVFT |
| | F0103464B09(L11V, T24A, | GWYRRAPGKQRELVARIYNEGNTQYADSAKGRFT |
| | T25S, S26H, A28Q, V40A, | ISRDNAKKTVYLQMNSLRPEDTALYYCLFSGTISTG |
| | E44Q, G54E, N58Q, | REYRSGDYWGQGTLVTVSS |
| | F62S, S68T, M77T, T79Y | |
| | R81Q, S82aN, N82bS, | |
| | K83R, G88A, V89L, | |
| | N99S) | |
| 122 | >F010302337 | EVQLVESGGGVVQPGGSLRLSCAASHRQFIRDVFT |
| | F0103464B09(L11V, T24A, | GWYRRAPGKQRELVARIYEGGNTQYADSAKGRFT |
| | T25S, S26H, A28Q, | ISRDNAKKTVYLQMNSLRPEDTALYYCLFSGTISTG |
| | V40A, E44Q, N53E, N58Q, | REYRSGDYWGQGTLVTVSS |
| | F62S, S68T, M77T, T79Y, | |
| | R81Q, S82aN, N82bS, | |
| | K83R, G88A, V89L, | |
| | N99S) | |
| 123 | >F010302338 | EVQLVESGGGVVQPGGSLRLSCAASHRAFIRDVFT |
| | F0103464B09(L11V, T24A, | GWYRRAPGKQRELVARIYESGNTQYADSAKGRFTI |
| | T25S, S26H, V40A, | SRDNAKKTVYLQMNSLRPEDTALYYCLFSGTISTG |
| | E44Q, N53E, G54S, N58Q, | REYRSGDYWGQGTLVTVSS |
| | F62S, S68T, M77T, T79Y, | |
| | R81Q, S82aN, N82bS, | |
| | K83R, G88A, V89L, | |
| | N99S) | |
| 124 | >F010302339 | EVQLVESGGGVVQPGGSLRLSCAASHRAFIRDVFT |
| | F0103464B09(L11V, T24A, | GWYRRAPGKQRELVARIYEGGNTQYADSAKGRFT |
| | T25S, S26H, V40A, | ISRDNAKKTVYLQMNSLRPEDTALYYCLFSGTISTG |
| | E44Q, N53E, N58Q, F62S, | REYRSGDYWGQGTLVTVSS |
| | S68T, M77T, T79Y, R81Q, | |
| | S82aN, N82bS, K83R, | |
| | G88A, V89L, N99S) | |
| 125 | >F010302340 | EVQLVESGGGVVQPGGSLRLSCAASHRAFIRDLFT |
| | F0103464B09(L11V, T24A, | GWYRRAPGKQRELVARIYESGNTNYADSAKGRFTI |
| | T25S, S26H, V33L, | SRDNAKKTVYLQMNSLRPEDTALYYCLFSGTISTG |
| | V40A, E44Q, N53E, G54S, | REYRSGDYWGQGTLVTVSS |
| | F62S, S68T, M77T, T79Y, | |
| | R81Q, S82aN, N82bS, | |
| | K83R, G88A, V89L, | |
| | N99S) | |
| 126 | >F010302341 | EVQLVESGGGVVQPGGSLRLSCAASSRQFIRDVFT |
| | F0103464B09(L11V, T24A, | GWYRQAPGKQRELVARIYNEGNTNYADSAKGRFT |
| | T25S, A28Q, R39Q, | ISRDNAKKTVYLQMNSLRPEDTALYYCLFSGTISTG |
| | V40A, E44Q, G54E, F62S, | REYRSGDYWGQGTLVTVSS |
| | S68T, M77T, T79Y, R81Q, | |
| | S82aN, N82bS, K83R, | |
| | G88A, V89L, N99S) | |
| 127 | >F010302342 | EVQLVESGGGVVQPGGSLRLSCAASSRQFIRDVFT |
| | F0103464B09(L11V, T24A, | GWYRQAPGKQRELVARIYNEGNTQYADSAKGRFT |
| | T25S, A28Q, R39Q, | ISRDNAKKTVYLQMNSLRPEDTALYYCLFSGTISTG |
| | V40A, E44Q, G54E, N58Q, | REYRSGDYWGQGTLVTVSS |
| | F62S, S68T, M77T, T79Y, | |
| | R81Q, S82aN, N82bS, | |
| | K83R, G88A, V89L, | |
| | N99S) | |
| 128 | >F010302343 | EVQLVESGGGVVQPGGSLRLSCAASSRQFIRDVFT |
| | F0103464B09(L11V, T24A, | GWYRQAPGKQRELVARIYESGNTQYADSAKGRFTI |
| | T25S, A28Q, R39Q, V40A, | SRDNAKKTVYLQMNSLRPEDTALYYCLFSGTISTG |
| | E44Q, N53E, G54S, | REYRSGDYWGQGTLVTVSS |
| | N58Q, F62S, S68T, M77T, | |
| | T79Y, R81Q, S82aN, | |
| | N82bS, K83R, G88A, | |
| | V89L, N99S) | |
| 129 | >F010302344 | EVQLVESGGGVVQPGGSLRLSCAASHRQFIRDVFT |
| | F0103464B09(L11V, T24A, | GWYRQAPGKQRELVARIYNEGNTQYADSAKGRFT |
| | T25S, S26H, A28Q, | ISRDNAKKTVYLQMNSLRPEDTALYYCLFSGTISTG |
| | R39Q, V40A, E44Q, G54E, | REYRSGDYWGQGTLVTVSS |
| | N58Q, F62S, S68T, M77T, | |
| | T79Y, R81Q, S82aN, | |
| | N82bS, K83R, G88A, | |
| | V89L, N99S) | |
| 130 | >F010302345 | EVQLVESGGGVVQPGGSLRLSCAASHRQFIRDVFT |
| | F0103464B09(L11V, T24A, | GWYRQAPGKQRELVARIYEGGNTQYADSAKGRFT |
| | T25S, S26H, A28Q, | ISRDNAKKTVYLQMNSLRPEDTALYYCLFSGTISTG |
| | R39Q, V40A, E44Q, N53E, | REYRSGDYWGQGTLVTVSS |
| | N58Q, F62S, S68T, M77T, | |
| | T79Y, R81Q, S82aN, | |
| | N82bS, K83R, G88A, | |
| | V89L, N99S) | |
| 131 | >F010302346 | EVQLVESGGGVVQPGGSLRLSCAASHRAFIRDVFT |
| | F0103464B09(L11V, T24A, | GWYRQAPGKQRELVARIYESGNTQYADSAKGRFTI |
| | T25S, S26H, R39Q, | SRDNAKKTVYLQMNSLRPEDTALYYCLFSGTISTG |
| | V40A, E44Q, N53E, G54S, | REYRSGDYWGQGTLVTVSS |
| | N58Q, F62S, S68T, M77T, | |
| | T79Y, R81Q, S82aN, | |
| | N82bS, K83R, G88A, | |
| | V89L, N99S) | |
| 132 | >F010302347 | EVQLVESGGGVVQPGGSLRLSCAASHRAFIRDVFT |
| | F0103464B09(L11V, T24A, | GWYRQAPGKQRELVARIYEGGNTQYADSAKGRFT |
| | T25S, S26H, R39Q, | ISRDNAKKTVYLQMNSLRPEDTALYYCLFSGTISTG |
| | V40A, E44Q, N53E, N58Q, | REYRSGDYWGQGTLVTVSS |
| | F62S, S68T, M77T, T79Y, | |
| | R81Q, S82aN, N82bS, | |
| | K83R, G88A, V89L, | |
| | N99S) | |
| 133 | >F010302348 | EVQLVESGGGVVQPGGSLRLSCAASHRAFIRDLFT |
| | F0103464B09(L11V, T24A, | GWYRQAPGKQRELVARIYESGNTNYADSAKGRFTI |
| | T25S, S26H, V33L, | SRDNAKKTVYLQMNSLRPEDTALYYCLFSGTISTG |
| | R39Q, V40A, E44Q, N53E, | REYRSGDYWGQGTLVTVSS |
| | G54S,F62S, S68T, M77T, | |
| | T79Y, R81Q, S82aN, | |
| | N82bS, K83R, G88A, | |
| | V89L, N99S) | |
| 134 | >F010302349 | EVQLVESGGGVVQPGGSLRLSCAASSRQFIRDVFT |
| | F0103464B09(L11V, T24A, | GWYRRAPGKQRELVARIYNEGNTNYADSVKGRFT |
| | T25S, A28Q, V40A, | ISRDNAKKTVYLQMNSLRPEDTALYYCLFSGTISTG |
| | E44Q, G54E, F62S, A63V, | REYRSGDYWGQGTLVTVSS |
| | S68T, M77T, T79Y, R81Q, | |
| | S82aN, N82bS, K83R, | |
| | G88A, V89L, N99S) | |
| 135 | >F010302350 | EVQLVESGGGVVQPGGSLRLSCAASSRQFIRDVFT |
| | F0103464B09(L11V, T24A, | GWYRRAPGKQRELVARIYNEGNTQYADSVKGRFT |
| | T25S, A28Q, V40A, | ISRDNAKKTVYLQMNSLRPEDTALYYCLFSGTISTG |
| | E44Q, G54E, N58Q, F62S, | REYRSGDYWGQGTLVTVSS |
| | A63V, S68T, M77T, T79Y, | |
| | R81Q, S82aN, N82bS, | |
| | K83R, G88A, V89L, | |
| | N99S) | |
| 136 | >F010302351 | EVQLVESGGGVVQPGGSLRLSCAASSRQFIRDVFT |
| | F0103464B09(L11V, T24A, | GWYRRAPGKQRELVARIYESGNTQYADSVKGRFTI |
| | T25S, A28Q, V40A, | SRDNAKKTVYLQMNSLRPEDTALYYCLFSGTISTG |
| | E44Q, N53E, G54S, N58Q, | REYRSGDYWGQGTLVTVSS |
| | F62S, A63V, S68T, M77T, | |
| | T79Y, R81Q, S82aN, N82bS, | |
| | K83R, G88A, | |
| | V89L, N99S) | |
| 137 | >F010302352 | EVQLVESGGGVVQPGGSLRLSCAASHRQFIRDVFT |
| | F0103464B09(L11V, T24A, | GWYRRAPGKQRELVARIYNEGNTQYADSVKGRFT |
| | T25S, S26H, A28Q, | ISRDNAKKTVYLQMNSLRPEDTALYYCLFSGTISTG |
| | V40A, E44Q, G54E, N58Q, | REYRSGDYWGQGTLVTVSS |
| | F62S, A63V, S68T, M77T, | |
| | T79Y, R81Q, S82aN, | |
| | N82bS, K83R, G88A, | |
| | V89L, N99S) | |
| 138 | >F010302353 | EVQLVESGGGVVQPGGSLRLSCAASHRQFIRDVFT |
| | F0103464B09(L11V, T24A, | GWYRRAPGKQRELVARIYEGGNTQYADSVKGRFT |
| | T25S, S26H, A28Q, | ISRDNAKKTVYLQMNSLRPEDTALYYCLFSGTISTG |
| | V40A, E44Q, N53E, N58Q, | REYRSGDYWGQGTLVTVSS |
| | F62S, A63V, S68T, M77T, | |
| | T79Y, R81Q, S82aN, | |
| | N82bS, K83R, G88A, | |
| | V89L, N99S) | |
| 139 | >F010302354 | EVQLVESGGGVVQPGGSLRLSCAASHRAFIRDVFT |
| | F0103464B09(L11V, T24A, | GWYRRAPGKQRELVARIYESGNTQYADSVKGRFTI |
| | T25S, S26H, V40A, | SRDNAKKTVYLQMNSLRPEDTALYYCLFSGTISTG |
| | E44Q, N53E, G54S, N58Q, | REYRSGDYWGQGTLVTVSS |
| | F62S, A63V, S68T, M77T, | |
| | T79Y, R81Q, S82aN, | |
| | N82bS, K83R, G88A, | |
| | V89L, N99S) | |
| 140 | >F010302355 | EVQLVESGGGVVQPGGSLRLSCAASHRAFIRDVFT |
| | F0103464B09(L11V, T24A, | GWYRRAPGKQRELVARIYEGGNTQYADSVKGRFT |
| | T25S, S26H, V40A, | ISRDNAKKTVYLQMNSLRPEDTALYYCLFSGTISTG |
| | E44Q, N53E, N58Q, F62S, | REYRSGDYWGQGTLVTVSS |
| | A63V, S68T, M77T, T79Y, | |
| | R81Q, S82aN, N82bS, | |
| | K83R, G88A, V89L, | |
| | N99S) | |
| 141 | >F010302356 | EVQLVESGGGVVQPGGSLRLSCAASHRAFIRDLFT |
| | F0103464B09(L11V, T24A, | GWYRRAPGKQRELVARIYESGNTNYADSVKGRFTI |
| | T25S, S26H, V33L, | SRDNAKKTVYLQMNSLRPEDTALYYCLFSGTISTG |
| | V40A, E44Q, N53E, G54S, | REYRSGDYWGQGTLVTVSS |
| | F62S, A63V, S68T, M77T, | |
| | T79Y, R81Q, S82aN, | |
| | N82bS, K83R, G88A, | |
| | V89L, N99S) | |
| 142 | >F010302357 | EVQLVESGGGVVQPGGSLRLSCAASSRQFIRDVFT |
| | F0103464B09(L11V, T24A, | GWYRQAPGKQRELVARIYNEGNTNYADSVKGRFT |
| | T25S, A28Q, R39Q, | ISRDNAKKTVYLQMNSLRPEDTALYYCLFSGTISTG |
| | V40A, E44Q, G54E, F62S, | REYRSGDYWGQGTLVTVSS |
| | A63V, S68T, M77T, T79Y, | |
| | R81Q, S82aN, N82bS, | |
| | K83R, G88A, V89L, | |
| | N99S) | |
| 143 | >F010302358 | EVQLVESGGGVVQPGGSLRLSCAASSRQFIRDVFT |
| | F0103464B09(L11V, T24A, | GWYRQAPGKQRELVARIYNEGNTQYADSVKGRFT |
| | T25S, A28Q, R39Q, | ISRDNAKKTVYLQMNSLRPEDTALYYCLFSGTISTG |
| | V40A, E44Q, G54E, N58Q, | REYRSGDYWGQGTLVTVSS |
| | F62S, A63V, S68T, M77T, | |
| | T79Y, R81Q, S82aN, | |
| | N82bS, K83R, G88A, | |
| | V89L, N99S) | |
| 144 | >F010302359 | EVQLVESGGGVVQPGGSLRLSCAASSRQFIRDVFT |
| | F0103464B09(L11V, T24A, | GWYRQAPGKQRELVARIYESGNTQYADSVKGRFTI |
| | T25S, A28Q, R39Q, | SRDNAKKTVYLQMNSLRPEDTALYYCLFSGTISTG |
| | V40A, E44Q, N53E, G54S, | REYRSGDYWGQGTLVTVSS |
| | N58Q, F62S, A63V, S68T, | |
| | M77T, T79Y, R81Q, S82aN, | |
| | N82bS, K83R, | |
| | G88A, V89L, N99S) | |
| 145 | >F010302360 | EVQLVESGGGVVQPGGSLRLSCAASHRQFIRDVFT |
| | F0103464B09(L11V, T24A, | GWYRQAPGKQRELVARIYNEGNTQYADSVKGRFT |
| | T25S, S26H, A28Q, | ISRDNAKKTVYLQMNSLRPEDTALYYCLFSGTISTG |
| | R39Q, V40A, E44Q, G54E, | REYRSGDYWGQGTLVTVSS |
| | N58Q, F62S, A63V, S68T, | |
| | M77T, T79Y, R81Q, S82aN, | |
| | N82bS, K83R, | |
| | G88A, V89L, N99S) | |
| 146 | >F010302361 | EVQLVESGGGVVQPGGSLRLSCAASHRQFIRDVFT |
| | F0103464B09(L11V, T24A, | GWYRQAPGKQRELVARIYEGGNTQYADSVKGRFT |
| | T25S, S26H, A28Q, | ISRDNAKKTVYLQMNSLRPEDTALYYCLFSGTISTG |
| | R39Q, V40A, E44Q, N53E, | REYRSGDYWGQGTLVTVSS |
| | N58Q, F62S, A63V, S68T, | |
| | M77T, T79Y, R81Q, S82aN, | |
| | N82bS, K83R, | |
| | G88A, V89L, N99S) | |
| 147 | >F010302362 | EVQLVESGGGVVQPGGSLRLSCAASHRAFIRDVFT |
| | F0103464B09(L11V, T24A, | GWYRQAPGKQRELVARIYESGNTQYADSVKGRFTI |
| | T25S, S26H, R39Q, | SRDNAKKTVYLQMNSLRPEDTALYYCLFSGTISTG |
| | V40A, E44Q, N53E, G54S, | REYRSGDYWGQGTLVTVSS |
| | N58Q, F62S, A63V, S68T, | |
| | M77T, T79Y, R81Q, | |
| | S82aN, N82bS, K83R, | |
| | G88A, V89L, N99S) | |
| 148 | >F010302363 | EVQLVESGGGVVQPGGSLRLSCAASHRAFIRDVFT |
| | F0103464B09(L11V, T24A, | GWYRQAPGKQRELVARIYEGGNTQYADSVKGRFT |
| | T25S, S26H, R39Q, | ISRDNAKKTVYLQMNSLRPEDTALYYCLFSGTISTG |
| | V40A, E44Q, N53E, N58Q, | REYRSGDYWGQGTLVTVSS |
| | F62S, A63V, S68T, M77T, | |
| | T79Y, R81Q, S82aN, | |
| | N82bS, K83R, G88A, | |
| | V89L, N99S) | |
| 149 | >F010302364 | EVQLVESGGGVVQPGGSLRLSCAASHRAFIRDLFT |
| | F0103464B09(L11V, T24A, | GWYRQAPGKQRELVARIYESGNTNYADSVKGRFTI |
| | T25S, S26H, V33L, | SRDNAKKTVYLQMNSLRPEDTALYYCLFSGTISTG |
| | R39Q, V40A, E44Q, N53E, | REYRSGDYWGQGTLVTVSS |
| | G54S, F62S, A63V, S68T, | |
| | M77T, T79Y, R81Q, | |
| | S82aN, N82bS, K83R, | |
| | G88A, V89L, N99S) | |
| 150 | >F010302365 | EVQLVESGGGVVQPGGSLRLSCAASSRAFIRDVFT |
| | F0103464B09(L11V, T24A, | GWYRRAPGKQRELVARIYNGGNTNYADSAKGRFT |
| | T25S, V40A, E44Q, | ISRDNAKKTVYLQMNSLRPEDTALYYCLFSGTISTG |
| | F62S, S68T, M77T, T79Y, | REYRSGDYWGQGTLVTVSS |
| | R81Q, S82aN, N82bS, | |
| | K83R, G88A, V89L, N99S) | |
| 151 | >F010302366 | EVQLVESGGGVVQPGGSLRLSCAASSRAFIRDVFT |
| | F0103464B09(L11V, T24A, | GWYRQAPGKQRELVARIYNGGNTNYADSAKGRFT |
| | T25S, R39Q, V40A, | ISRDNAKKTVYLQMNSLRPEDTALYYCLFSGTISTG |
| | E44Q, F62S, S68T, M77T, | REYRSGDYWGQGTLVTVSS |
| | T79Y, R81Q, S82aN, | |
| | N82bS, K83R, G88A, V89L, | |
| | N99S) | |
| 152 | >F010302367 | EVQLVESGGGVVQPGGSLRLSCAASSRAFIRDVFT |
| | F0103464B09(L11V, T24A, | GWYRRAPGKQRELVARIYNGGNTNYADSVKGRFT |
| | T25S, V40A, E44Q, | ISRDNAKKTVYLQMNSLRPEDTALYYCLFSGTISTG |
| | F62S, A63V, S68T, M77T, | REYRSGDYWGQGTLVTVSS |
| | T79Y, R81Q, S82aN, | |
| | N82bS, K83R, G88A, V89L, | |
| | N99S) | |
| 153 | >F010302368 | EVQLVESGGGVVQPGGSLRLSCAASSRAFIRDVFT |
| | F0103464B09(L11V, T24A, | GWYRQAPGKQRELVARIYNGGNTNYADSVKGRFT |
| | T25S, R39Q, V40A, | ISRDNAKKTVYLQMNSLRPEDTALYYCLFSGTISTG |
| | E44Q, F62S, A63V, S68T, | REYRSGDYWGQGTLVTVSS |
| | M77T, T79Y, R81Q, | |
| | S82aN, N82bS, K83R, G88A, | |
| | V89L,N99S) | |
| 154 | >F010301656 | EVQLVESGGGLAQPGGSLRLSCAASGPVFNINRMA |
| | F0103387G04(K33R, S50Y, | WYRRAPGKQRELVAYVTPTGDISYTDSVKGRFTIS |
| | S56D, N93R) | RDGSKRWSLQMNSLTPEDTAVYYCRALLQPDSYS |
| | | NTRTYWGQGTLVTVSS |
| 155 | >F010301840 | EVQLVESGGGVVQPGGSLRLSCAASGPVFNINRMA |
| | F0103387G04(R76_V7 | WYRQAPGKQRELVAYVTPTGDISYTDSVKGRFTIS |
| | 8insT)(L11V, A12V, K33R, | RDGSKRTWSLQMNSLRPEDTALYYCRALLQPDSYS |
| | R39Q, S50Y, S56D, | NTRTYWGQGTLVTVSS |
| | T83R, V89L, N93R) | |
| 156 | >F010301841 | EVQLVESGGGVVQPGGSLRLSCAASGPVFNINRMA |
| | F0103387G04(L11V, A12V, | WYRQAPGKQRELVAYVTPTGDISYTDSVKGRFTIS |
| | K33R, R39Q, S50Y, | RDGSKRWSLQMNSLRPEDTALYYCRALLQPDSYS |
| | S56D, T83R, V89L, N93R) | NTRTYWGQGTLVTVSS |
| 157 | >F010301842 | EVQLVESGGGVVQPGGSLRLSCAASGPVFNINRMA |
| | F0103387G04(L11V, A12V, | WYRQAPGKQRELVAYVTPTGDISYADSVKGRFTIS |
| | K33R, R39Q, S50Y, | RDGSKRWSLQMNSLRPEDTALYYCRALLQPDSYS |
| | S56D, T60A, T83R, V89L, | NTRTYWGQGTLVTVSS |
| | N93R) | |
| 158 | >F010301843 | EVQLVESGGGVVQPGGSLRLSCAASGPVFNINRMA |
| | F0103387G04(L11V, A12V, | WYRQAPGKQRELVAYVTPTGDISYTDSVKGRFTIS |
| | K33R, R39Q, S50Y, | RDNSKRWSLQMNSLRPEDTALYYCRALLQPDSYS |
| | S56D, G73N, T83R, V89L, | NTRTYWGQGTLVTVSS |
| | N93R) | |
| 159 | >F010301844 | EVQLVESGGGVVQPGGSLRLSCAASGPVFNINRMA |
| | F0103387G04(L11V, A12V, | WYRQAPGKQRELVAYVTPTGDISYTDSVKGRFTIS |
| | K33R, R39Q, S50Y, | RDGSKNWSLQMNSLRPEDTALYYCRALLQPDSYS |
| | S56D, R76N, T83R, V89L, | NTRTYWGQGTLVTVSS |
| | N93R) | |
| 160 | >F010301845 | EVQLVESGGGVVQPGGSLRLSCAASGPVFNINRMA |
| | F0103387G04(L11V, A12V, | WYRQAPGKQRELVAYVTPTGDISYTDSVKGRFTIS |
| | K33R, R39Q, S50Y, | RDGSKRVSLQMNSLRPEDTALYYCRALLQPDSYSN |
| | S56D, W78V, T83R, V89L, | TRTYWGQGTLVTVSS |
| | N93R) | |
| 161 | >F010301846 | EVQLVESGGGVVQPGGSLRLSCAASGPVFNINRMA |
| | F0103387G04(L11V, A12V, | WYRQAPGKQRELVAYVTPTGDISYTDSVKGRFTIS |
| | K33R, R39Q, S50Y, | RDGSKRWYLQMNSLRPEDTALYYCRALLQPDSYS |
| | S56D, S79Y, T83R, V89L, | NTRTYWGQGTLVTVSS |
| | N93R) | |
| 162 | >F010301847 | EVQLVESGGGVVQPGGSLRLSCAASGPVFNINRMA |
| | F0103387G04(L11V, A12V, | WYRQAPGKQRELVAYVTPTGDISYADSVKGRFTIS |
| | K33R, R39Q, S50Y, | RDNSKNVYLQMNSLRPEDTALYYCRALLQPDSYS |
| | S56D, T60A, G73N, R76N, | NTRTYWGQGTLVTVSS |
| | W78V, S79Y, T83R, V89L, | |
| | N93R) | |
| 163 | >F010301848 | EVQLVESGGGVVQPGGSLRLSCAASGPVFNINRMA |
| | F0103387G04(L11V, A12V, | WYRQAPGKQRELVAYVTPTGDISYADSVKGRFTIS |
| | K33R, R39Q, S50Y, | RDNSKRVYLQMNSLRPEDTALYYCRALLQPDSYS |
| | S56D, T60A, G73N, W78V, | NTRTYWGQGTLVTVSS |
| | S79Y, T83R, V89L, N93R) | |
| 164 | >F010301865 | EVQLVESGGGVVQPGGSLRLSCAASGPVFNINRMA |
| | F0103387G04(L11V, A12V, | WYRQAPGKQRELVAYVTPTGDISYADSVKGRFTIS |
| | K33R, R39Q, S50Y, | RDGSKRVYLQMNSLRPEDTALYYCRALLQPDSYS |
| | S56D, T60A, W78V, S79Y, | NTRTYWGQGTLVTVS |
| | T83R, V89L, N93R) | |
| 165 | >F010301866 | EVQLVESGGGVVQPGGSLRLSCAASGPVFNINRMA |
| | F0103387G04(L11V, A12V, | WYRQAPGKQRELVAYVTPTGDISYADSVKGRFTIS |
| | K33R, R39Q, S50Y, | RDGSKNVYLQMNSLRPEDTALYYCRALLQPDSYS |
| | S56D, T60A, R76N, W78V, | NTRTYWGQGTLVTVSS |
| | S79Y, T83R, V89L, N93R) | |
| 166 | >F010302310 | EVQLVESGGGVVQPGGSLRLSCAASGPVFNINRMA |
| | F0103387G04(L11V, A12V, | WYRQAPGKQRELVAYVTPTGDISYADSVKGRFTIS |
| | K33R, R39Q, S50Y, | RDASKRVYLQMNSLRPEDTALYYCRALLQPRRYS |
| | S56D, T60A, G73A, W78V, | NTRTYWGQGTLVTVSS |
| | S79Y, T83R, V89L, N93R, | |
| | D99R, S100R)- | |
| | FLAG3-HIS6 | |
| 167 | >F010302311 | EVQLVESGGGVVQPGGSLRLSCAASGPVFNINRMA |
| | F0103387G04(L11V, A12V, | WYRQAPGKQRELVAYVTPTGDISYADSVKGRFTIS |
| | K33R, R39Q, S50Y, | RDRSKRVYLQMNSLRPEDTALYYCRALLQPRRYS |
| | S56D, T60A, G73R, W78V, | NTRTYWGQGTLVTVSS |
| | S79Y, T83R, V89L, N93R, | |
| | D99R, S100R)- | |
| | FLAG3-HIS6 | |
| 168 | >F010302312 | EVQLVESGGGVVQPGGSLRLSCAASGPVFNINRMA |
| | F0103387G04(L11V, A12V, | WYRQAPGKQRELVAYVTPTGDISYADSVKGRFTIS |
| | K33R, R39Q, S50Y, | RDGSKRVYLQMNSLRPEDTALYYCRALLQPDSYSI |
| | S56D, T60A, W78V, S79Y, | TRTYWGQGTLVTVSS |
| | T83R, V89L, N93R, N100cI) | |
| 169 | >F010302313 | EVQLVESGGGVVQPGGSLRLSCAASGPVFNINRMA |
| | F0103387G04(L11V, A12V, | WYRQAPGKQRELVAYVTPTGDISYADSVKGRFTIS |
| | K33R, R39Q, S50Y, | RDASKRVYLQMNSLRPEDTALYYCRALLQPDSYSI |
| | S56D, T60A, G73A, W78V, | TRTYWGQGTLVTVSS |
| | S79Y, T83R, V89L, N93R, | |
| | N100cI) | |
| 170 | >F010302314 | EVQLVESGGGVVQPGGSLRLSCAASGPVFNINRMA |
| | F0103387G04(L11V, A12V, | WYRQAPGKQRELVAYVTPTGDISYADSVKGRFTIS |
| | K33R, R39Q, S50Y, | RDRSKRVYLQMNSLRPEDTALYYCRALLQPDSYSI |
| | S56D, T60A, G73R, W78V, | TRTYWGQGTLVTVSS |
| | S79Y, T83R, V89L, N93R, | |
| | N100cI) | |
| 171 | >F010302315 | EVQLVESGGGVVQPGGSLRLSCAASGPVFNINRMA |
| | F0103387G04(L11V, A12V, | WYRQAPGKQRELVAYVTPTGDISYADSVKGRFTIS |
| | K33R, R39Q, S50Y, | RDGSKRVYLQMNSLRPEDTALYYCRALLQPRSYSI |
| | S56D, T60A, W78V, S79Y, | TRTYWGQGTLVTVSS |
| | T83R, V89L, N93R, D99R, | |
| | N100cI) | |
| 172 | >F010302316 | EVQLVESGGGVVQPGGSLRLSCAASGPVFNINRMA |
| | F0103387G04(L11V, A12V, | WYRQAPGKQRELVAYVTPTGDISYADSVKGRFTIS |
| | K33R, R39Q, S50Y, | RDASKRVYLQMNSLRPEDTALYYCRALLQPRSYSI |
| | S56D, T60A, G73A, W78V, | TRTYWGQGTLVTVSS |
| | S79Y, T83R, V89L, N93R, | |
| | D99R, N100cI)- | |
| | FLAG3-HIS6 | |
| 173 | >F010302317 | EVQLVESGGGVVQPGGSLRLSCAASGPVFNINRMA |
| | F0103387G04(L11V, A12V, | WYRQAPGKQRELVAYVTPTGDISYADSVKGRFTIS |
| | K33R, R39Q, S50Y, | RDRSKRVYLQMNSLRPEDTALYYCRALLQPRSYSI |
| | S56D, T60A, G73R, W78V, | TRTYWGQGTLVTVSS |
| | S79Y, T83R, V89L, N93R, | |
| | D99R, N100cI)- | |
| | FLAG3-HIS6 | |
| 174 | >F010302318 | EVQLVESGGGVVQPGGSLRLSCAASGPVFNINRMA |
| | F0103387G04(L11V, A12V, | WYRQAPGKQRELVAYVTPTGDISYADSVKGRFTIS |
| | K33R, R39Q, S50Y, | RDGSKRVYLQMNSLRPEDTALYYCRALLQPDRYSI |
| | S56D, T60A, W78V, S79Y, | TRTYWGQGTLVTVSS |
| | T83R, V89L, N93R, S100R, | |
| | N100cI) | |
| 175 | >F010302319 | EVQLVESGGGVVQPGGSLRLSCAASGPVFNINRMA |
| | F0103387G04(L11V, A12V, | WYRQAPGKQRELVAYVTPTGDISYADSVKGRFTIS |
| | K33R, R39Q, S50Y, | RDASKRVYLQMNSLRPEDTALYYCRALLQPDRYSI |
| | S56D, T60A, G73A, W78V, | TRTYWGQGTLVTVSS |
| | S79Y, T83R, V89L, N93R, | |
| | S100R, N100cI)- | |
| | FLAG3-HIS6 | |
| 176 | >F010302320 | EVQLVESGGGVVQPGGSLRLSCAASGPVFNINRMA |
| | F0103387G04(L11V, A12V, | WYRQAPGKQRELVAYVTPTGDISYADSVKGRFTIS |
| | K33R, R39Q, S50Y, | RDASKRVYLQMNSLRPEDTALYYCRALLQPDSYS |
| | S56D, T60A, G73A, W78V, | NTRTYWGQGTLVTVSS |
| | S79Y, T83R, V89L, N93R) | |
| 177 | >F010302321 | EVQLVESGGGVVQPGGSLRLSCAASGPVFNINRMA |
| | F0103387G04(L11V, A12V, | WYRQAPGKQRELVAYVTPTGDISYADSVKGRFTIS |
| | K33R, R39Q, S50Y, | RDRSKRVYLQMNSLRPEDTALYYCRALLQPDRYSI |
| | S56D, T60A, G73R, W78V, | TRTYWGQGTLVTVSS |
| | S79Y, T83R, V89L, N93R, | |
| | S100R,N100cI)- | |
| | FLAG3-HIS6 | |
| 178 | >F010302322 | EVQLVESGGGVVQPGGSLRLSCAASGPVFNINRMA |
| | F0103387G04(L11V, A12V, | WYRQAPGKQRELVAYVTPTGDISYADSVKGRFTIS |
| | K33R, R39Q, 50Y, | RDGSKRVYLQMNSLRPEDTALYYCRALLQPRRYSI |
| | S56D, T60A, W78V, S79Y, | TRTYWGQGTLVTVSS |
| | T83R, V89L, N93R, D99R, | |
| | S100R, N100cI)- | |
| | FLAG3-HIS6 | |
| 179 | >F010302323 | EVQLVESGGGVVQPGGSLRLSCAASGPVFNINRMA |
| | F0103387G04(L11V, A12V, | WYRQAPGKQRELVAYVTPTGDISYADSVKGRFTIS |
| | K33R, R39Q, S50Y, | RDASKRVYLQMNSLRPEDTALYYCRALLQPRRYSI |
| | S56D, T60A, G73A, W78V, | TRTYWGQGTLVTVSS |
| | S79Y, T83R, V89L, N93R, | |
| | D99R, S100R, N100cI) | |
| 180 | >F010302324 | EVQLVESGGGVVQPGGSLRLSCAASGPVFNINRMA |
| | F0103387G04(L11V, A12V, | WYRQAPGKQRELVAYVTPTGDISYADSVKGRFTIS |
| | K33R, R39Q, S50Y, | RDRSKRVYLQMNSLRPEDTALYYCRALLQPRRYSI |
| | S56D, T60A, G73R, W78V, | TRTYWGQGTLVTVSS |
| | S79Y, T83R, V89L, N93R, | |
| | D99R, S100R, N100cI) | |
| 181 | >F010302325 | EVQLVESGGGVVQPGGSLRLSCAASGPVFNINRMA |
| | F0103387G04(L11V, A12V, | WYRQAPGKQRELVAYVTPTGDISYADSVKGRFTIS |
| | K33R, R39Q, S50Y, | RDRSKRVYLQMNSLRPEDTALYYCRALLQPDSYSN |
| | S56D, T60A, G73R, W78V, | TRTYWGQGTLVTVSS |
| | S79Y, T83R, V89L, N93R) | |
| 182 | >F010302326 | EVQLVESGGGVVQPGGSLRLSCAASGPVFNINRMA |
| | F0103387G04(L11V,A1 | WYRQAPGKQRELVAYVTPTGDISYADSVKGRFTIS |
| | 2V,K33R,R39Q,S50Y,S | RDGSKRVYLQMNSLRPEDTALYYCRALLQPRSYSN |
| | 56D,T60A, W78V,S79Y | TRTYWGQGTLVTVSS |
| | T83R, V89L,N93R,D99 | |
| | R) | |
| 183 | >F010302327 | EVQLVESGGGVVQPGGSLRLSCAASGPVFNINRMA |
| | F0103387G04(L11V,A1 | WYRQAPGKQRELVAYVTPTGDISYADSVKGRFTIS |
| | 2V,K33R,R39Q,S50Y,S | RDASKRVYLQMNSLRPEDTALYYCRALLQPRSYSN |
| | 56D,T60A, G73A, W78V | TRTYWGQGTLVTVSS |
| | ,S79Y,T83R,V89L,N93 | |
| | R,D99R) | |
| 184 | >F010302328 | EVQLVESGGGVVQPGGSLRLSCAASGPVFNINRMA |
| | F0103387G04(L11V,A1 | WYRQAPGKQRELVAYVTPTGDISYADSVKGRFTIS |
| | 2V,K33R,R39Q,S50Y,S | RDRSKRVYLQMNSLRPEDTALYYCRALLQPRSYSN |
| | 56D,T60A,G73R, W78V | TRTYWGQGTLVTVSS |
| | ,S79Y,T83R,V89L,N93 | |
| | R,D99R) | |
| 185 | >F010302329 | EVQLVESGGGVVQPGGSLRLSCAASGPVFNINRMA |
| | F0103387G04(L11V,A1 | WYRQAPGKQRELVAYVTPTGDISYADSVKGRFTIS |
| | 2V,K33R,R39Q,S50Y,S | RDGSKRVYLQMNSLRPEDTALYYCRALLQPDRYS |
| | 56D,T60A,W78V,S79Y | NTRTYWGQGTLVTVSS |
| | T83R,V89L,N93R,S10 | |
| | 0R) | |
| 186 | >F010302330 | EVQLVESGGGVVQPGGSLRLSCAASGPVFNINRMA |
| | F0103387G04(L11V, A12V, | WYRQAPGKQRELVAYVTPTGDISYADSVKGRFTIS |
| | K33R, R39Q, S50Y, | RDASKRVYLQMNSLRPEDTALYYCRALLQPDRYS |
| | 5S6D, T60A, G73A, W78V, | NTRTYWGQGTLVTVSS |
| | S79Y, T83R, V89L, N93R, | |
| | S100R) | |
| 187 | >F010302331 | EVQLVESGGGVVQPGGSLRLSCAASGPVFNINRMA |
| | F0103387G04(L11V, A12V, | WYRQAPGKQRELVAYVTPTGDISYADSVKGRFTIS |
| | K33R, R39Q, S50Y, | RDRSKRVYLQMNSLRPEDTALYYCRALLQPDRYS |
| | S56D, T60A, G73R, W78V, | NTRTYWGQGTLVTVSS |
| | S79Y, T83R, V89L, N93R, | |
| | S100R) | |
| 188 | >F010302332 | EVQLVESGGGVVQPGGSLRLSCAASGPVFNINRMA |
| | F0103387G04(L11V, A12V, | WYRQAPGKQRELVAYVTPTGDISYADSVKGRFTIS |
| | K33R, R39Q, S50Y, | RDGSKRVYLQMNSLRPEDTALYYCRALLQPRRYS |
| | S56D, T60A, W78V, S79Y, | NTRTYWGQGTLVTVSS |
| | T83R, V89L, N93R, D99R, | |
| | S100R) | |
| 189 | >F010302370 | EVQLVESGGGVVQPGGSLRLSCAASGPVFNINRMA |
| | F0103387G04(L11V, A12V, | WYRQAPGKQRELVAYVTPTGDISYADSVKGRFTIS |
| | K33R, R39Q, S50Y, | RDRSKRVYLQMNSLRPEDTALYYCRALLQPSSYSI |
| | S56D, T60A, G73R, W78V, | TRTYWGQGTLVTVSS |
| | S79Y, T83R, V89L, N93R, | |
| | D99S, N100cI) | |
| 190 | >F010302371 | EVQLVESGGGVVQPGGSLRLSCAASGPVFNINRMA |
| | F0103387G04(L11V, A12V, | WYRQAPGKQRELVAYVTPTGDISYADSVKGRFTIS |
| | K33R, R39Q, S50Y, | RDRSKRVYLQMNSLRPEDTALYYCRALLQPNVYSI |
| | S56D, T60A, G73R, W78V, | TRTYWGQGTLVTVSS |
| | S79Y, T83R, V89L, N93R, | |
| | D99N, S100V, N100cI) | |
| 191 | >F010302372 | EVQLVESGGGVVQPGGSLRLSCAASGPVFNINRMA |
| | F0103387G04(L11V, A12V, | WYRQAPGKQRELVAYVTPTGDISYADSVKGRFTIS |
| | K33R, R39Q, S50Y, | RDRSKRVYLQMNSLRPEDTALYYCRALLQPDVYSI |
| | S56D, T60A, G73R, W78V, | TRTYWGQGTLVTVSS |
| | S79Y, T83R, V89L, N93R, | |
| | S100V, N100cI) | |
| 192 | >F010302383 | EVQLVESGGGVVQPGGSLRLSCAASGPVFNINRMA |
| | F0103387G04(L11V, A12V, | WYRQAPGKQRELVAYVTPTGDISYADSVKGRFTIS |
| | K33R, R39Q, S50Y, | RGGSKRVYLQMNSLRPEDTALYYCRALLQPSSYSG |
| | S56D, T60A, D72G, W78V, | TRTYWGQGTLVTVSS |
| | S79Y, T83R, V89L, N93R, | |
| | D99S, N100cG) | |
| 193 | >F010302384 | EVQLVESGGGVVQPGGSLRLSCAASGPVFNINRMA |
| | F0103387G04(L11V, A12V, | WYRQAPGKQRELVAYVTPTGDISYADSVKGRFTIS |
| | K33R, R39Q, S50Y, | RGGSKRVYLQMNSLRPEDTALYYCRALLQPSSYSI |
| | S56D, T60A, D72G, W78V, | TRTYWGQGTLVTVSS |
| | S79Y, T83R, V89L, N93R, | |
| | D99S, N100cI) | |
| 194 | >F010302385 | EVQLVESGGGVVQPGGSLRLSCAASGPVFNINRMA |
| | F0103387G04(L11V, A12V, | WYRQAPGKQRELVAYVTPTGDISYADSVKGRFTIS |
| | K33R, R39Q, S50Y, | RQGSKRVYLQMNSLRPEDTALYYCRALLQPSSYSG |
| | S56D, T60A, D72Q, W78V, | TRTYWGQGTLVTVSS |
| | S79Y, T83R, V89L, N93R, | |
| | D99S, N100cG) | |
| 195 | >F010302386 | EVQLVESGGGVVQPGGSLRLSCAASGPVFNINRMA |
| | F0103387G04(L11V, A12V, | WYRQAPGKQRELVAYVTPTGDISYADSVKGRFTIS |
| | K33R, R39Q, S50Y, | RQGSKRVYLQMNSLRPEDTALYYCRALLQPSSYSI |
| | S56D, T60A, D72Q, W78V, | TRTYWGQGTLVTVSS |
| | S79Y, T83R, V89L, N93R, | |
| | D99S, N100cI) | |
| 196 | F0103275B05-CDR1 | GSIFNINSMA |
| 197 | F0103275B05-CDR1-A | GSIFNINRMA |
| 198 | F0103275B05-CDR2 | SSTNGGSTN |
| 199 | F0103275B05-CDR2-A | YSTNGGDTN |
| 200 | F0103275B05-CDR3 | LLQPSIYDISRTY |
| 201 | F0103387G05-CDR1 | GRILRIGYMR |
| 202 | F0103387G05-CDR2 | RITDDSATD |
| 203 | F0103387G05-CDR2-A | RITGGSATG |
| 204 | F0103387G05-CDR2-B | RITDDSATG |
| 205 | F0103387G05-CDR2-C | RITGGSATG |
| 206 | F0103387G05-CDR3 | LVTASVRGGSIHSGTY |
| 207 | F0103464B09-CDR1 | SRAFIRDVFTG |
| 208 | F0103464B09-CDR1-A | SRAFIRDLFTG |
| 209 | F0103464B09-CDR1-B | SRQFIRDVFTG |
| 210 | F0103464B09-CDR1-C | HRQFIRDVFTG |
| 211 | F0103464B09-CDR1-D | HRAFIRDVFTG |
| 212 | F0103464B09-CDR1-E | HRAFIRDLFTG |
| 213 | F0103464B09-CDR2 | RIYNGGNTN |
| 214 | F0103464B09-CDR2-A | RIYNEGNTN |
| 215 | F0103464B09-CDR2-B | RIYNEGNTQ |
| 216 | F0103464B09-CDR2-C | RIYESGNTQ |
| 217 | F0103464B09-CDR2-D | RIYESGNTN |
| 218 | F0103464B09-CDR2-E | RIYNEGNTN |
| 219 | F0103464B09-CDR3 | SGTINTGREYRSGDY |
| 220 | F0103464B09-CDR3-A | SGTISTGREYRSGDY |
| 221 | F0103387G04-CDR1 | GPVFNINKMA |
| 222 | F0103387G04-CDR1-A | GPVFNINRMA |
| 223 | F0103387G04-CDR2 | SVTPTGSIS |
| 224 | F0103387G04-CDR2-A | YVTPTGDIS |
| 225 | F0103387G04-CDR3 | LLQPDSYSNTRTY |
| 226 | F0103387G04-CDR3-A | LLQPRRYSNTRTY |
| 227 | F0103387G04-CDR3-B | LLQPDSYSITRTY |
| 228 | F0103387G04-CDR3-C | LLQPRSYSITRTY |
| 229 | F0103387G04-CDR3-B | LLQPRSYSNTRTY |
| 230 | F0103387G04-CDR3-E | LLQPSSYSITRTY |
| 231 | F0103387G04-CDR3-F | LLQPNVYSITRTY |
| 232 | F0103387G04-CDR3-G | LLQPDVYSITRTY |
| 233 | F0103387G04-CDR3-H | LLQPSSYSGTRTY |
| 234 | ALB11002 (“ALB201”) | EVQLVESGGGXVQPGNSLRLSCAASGFTFSSFGMS |
| | without C- | WVRQAPGKGLEWVSSISGSGSDTLYADSVKGRFTI |
| | terminal A, X11 is L or | SRDNAKTTLYLQMNSLRPEDTAXYYCTIGGSLSRS |
| | V, X93 is V or L | SQGTLVTVSS |
| 235 | HSA-CDR1 | GFTFSSFGMS |
| 236 | HSA-CDR2 | SISGSGSDTL |
| 237 | HSA-CDR3 | GGSLSR |
| 238 | ALB11002 (“ALB201”), | EVQLVESGGGXVQPGNSLRLSCAASGFTFSSFGMS |
| | X11 is L or | WVRQAPGKGLEWVSSISGSGSDTLYADSVKGRFTI |
| | V, X93 is V or L | SRDNAKTTLYLQMNSLRPEDTAXYYCTIGGSLSRS |
| | | SQGTLVTVSSA |
| 239 | ALB11002 (“ALB201”) | DVQLVESGGGVVQPGNSLRLSCAASGFTFSSFGMS |
| | E1D L11V | WVRQAPGKGLEWVSSISGSGSDTLYADSVKGRFTI |
| | L93V without C- | SRDNAKTTLYLQMNSLRPEDTALYYCTIGGSLSRSS |
| | terminal A | QGTLVTVSS |
| 240 | ALB11002 (“ALB201”) | DVQLVESGGGVVQPGNSLRLSCAASGFTFSSFGMS |
| | E1D L11V | WVRQAPGKGLEWVSSISGSGSDTLYADSVKGRFTI |
| | L93V | SRDNAKTTLYLQMNSLRPEDTALYYCTIGGSLSRSS |
| | | QGTLVTVSSA |
| 241 | AB11 without C- | EVQLVESGGGLVQPGNSLRLSCAASGFTFSSFGMS |
| | terminal A | WVRQAPGKGLEWVSSISGSGSDTLYADSVKGRFTI |
| | | SRDNAKTTLYLQMNSLRPEDTAVYYCTIGGSLSRS |
| | | SQGTLVTVSS |
| 242 | AB11 | EVQLVESGGGLVQPGNSLRLSCAASGFTFSSFGMS |
| | | WVRQAPGKGLEWVSSISGSGSDTLYADSVKGRFTI |
| | | SRDNAKTTLYLQMNSLRPEDTAVYYCTIGGSLSRS |
| | | SQGTLVTVSS |
| 243 | 9GS-linker | GGGGSGGGS |
| 244 | 20GS linker | GGGGSGGGGSGGGGSGGGGS |
| 245 | 35GS linker | GGGGSGGGGSGGGGSGGGGSGGGGSGGGGSGGG |
| | | GS |
| 246 | Linker subunit | GGGS |
| 247 | F0103262B06-CDR1 | TRTFSTYAMG |
| 248 | F0103262B06-CDR2 | HINFSGSSTRY |
| 249 | F0103262B06-CDR3 | ARWVAGPPRYDYEY |
| 250 | F0103262C02-CDR1 | GLPFGLYILG |
| 251 | F0103262C02-CDR2 | AISRSGRDTV |
| 252 | F0103262C02-CDR3 | DSVPRGTPTITESEYAI |
| 253 | F0103265A11-CDR1 | GMLFNANTQG |
| 254 | F0103265A11-CDR2 | FIFSGGYTN |
| 255 | F0103265A11-CDR3 | SRY |
| 256 | F0103265B04-CDR1 | SFIFSNNYME |
| 257 | F0103265B04-CDR2 | RITGRGNTN |
| 258 | F0103265B04-CDR3 | LWYGGRA |
| 259 | F0103362B08-CDR1 | VRPFSTSAMG |
| 260 | F0103362B08-CDR2 | GILWNGIVTY |
| 261 | F0103362B08-CDR3 | DRDYGGRSFSAYEYEY |
| 262 | F0103454D07-CDR1 | GGIININYIA |
| 263 | F0103454D07-CDR2 | RISSDDTIK |
| 264 | F0103454D07-CDR3 | LITPWTGDTRTY |
| 265 | ALB00223 | EVQLVESGGGVVQPGGSLRLSCAASGFTFRSFGMS |
| | | WVRQAPGKGPEWVSSISGSGSDTLYADSVKGRFTI |
| | | SRDNSKNTLYLQMNSLRPEDTALYYCTIGGSLSRSS |
| | | QGTLVTVSSA |
| 266 | ALB00223 without C- | EVQLVESGGGVVQPGGSLRLSCAASGFTFRSFGMS |
| | terminal A | WVRQAPGKGPEWVSSISGSGSDTLYADSVKGRFTI |
| | | SRDNSKNTLYLQMNSLRPEDTALYYCTIGGSLSRSS |
| | | QGTLVTVSS |
| 267 | ALB00223-HSA-CDR1 | GFTFRSFGMS |
| 268 | VHH2-consensus | QVQLVESGGGLVQAGGSLRLSCAAS |
| | Framework 1 | |
| 269 | VHH2-consensus | WYRQAPGKQRELVA |
| | Framework 2 | |
| 270 | VHH2-consensus | YADSVKGRFTISRDNAKNTLYLQMNSLKPEDTAVY |
| | Framework 3 | YCNA |
| 271 | VHH2-consensus | WGQGTLVTVSS |
| | Framework 4 | |
| 272 | Nucleotide sequence | GCGGCCGCAGATTATAAAGATCATGATGGCGATT |
| | encoding FLAG-HIS6 | ATAAAGATCATGATATTGATTATAAAGATGATGA |
| | peptide | TGATAAAGGGGCCGCACATCATCATCATCATCAT |
| 273 | Nucleotide sequence | GAGGTGCAATTGGTGGAGTCTGGGGGAGGTTTG |
| | encoding F0103262B06 | GTGCAGCCTGGGGGCTCTCTGAGACTCTCGTGTG |
| | | CTGGGTCTACACGCACGTTTAGCACCTATGCCAT |
| | | GGGCTGGTTCCGCCAGGCTCCAGGGAGGGAGCG |
| | | TGAGTTTGTAGCACATATTAATTTTAGCGGTAGT |
| | | AGCACAAGGTATGCAGACTCCGTGAAGGGCCGA |
| | | TTCACCATCTCCAGAGACAACGCCAAGAATATGG |
| | | GATATCTGCAGATGAATAGCCTGAAACCTGAGG |
| | | ACACGGCCGTTTATTATTGTGCAGCCCGGTGGGT |
| | | CGCTGGCCCTCCGAGGTATGACTATGAGTACTGG |
| | | GGCCAGGGGACCCTGGTCACCGTCTCCTCA |
| 274 | Nucleotide sequence | GAGGTGCAATTGGTGGAGTCTGGGGGAGGATTG |
| | encoding F0103262C02 | GTGCAGGCTGGGGGCTCTCTGACACTCTCCTGTG |
| | | CAGCCTCTGGTCTGCCCTTCGGATTGTATATTCTG |
| | | GGCTGGATCCGCCGGGCTCCAGGGAAGGAGCGT |
| | | GATTTTGTAGCAGCTATTAGCCGGAGTGGTAGGG |
| | | ACACGGTTTATGCAAACTCCGTGAAGGGCCGATT |
| | | CACCATCTCCAGAGACAACGCCAAGAACATGGT |
| | | GTACCTGCGAATGGACAATCTGAGACCGGAGGA |
| | | CACGGCCGCATATTACTGTGCAGTGGACTCAGTG |
| | | CCACGCGGAACTCCTACCATCACAGAGTCTGAGT |
| | | ACGCCATCTGGGGCCAGGGGACCCTGGTCACCGT |
| | | CTCCTCA |
| 275 | Nucleotide sequence | GAGGTGCAATTGGTGGAGTCTGGGGGAGGCTTG |
| | encoding F0103265A11 | GTGCAGCCTGGAGGGTCTCTGAGACTCTCCTGTG |
| | | CAGCCTCTGGAATGCTCTTCAACGCCAATACCCA |
| | | GGGCTGGTACCGCCAGGCTCCAGGGAAGCAGCG |
| | | CGAATTGGTCGCATTTATTTTTAGTGGTGGTTAC |
| | | ACAAACTATGTAGACTCCGTGAAGGGCCGTTTCA |
| | | CCATCTCCAGAGACAACGCCAAGCGCACAATGT |
| | | ATCTGCAGATGAACAGCCTGAAACCTGAGGACT |
| | | CGGCCATCTATTACTGCTCATTGAGTCGCTACTT |
| | | GGGCCAGGGGACCCTGGTCACCGTCTCCTCA |
| 276 | Nucleotide sequence | GAGGTGCAATTGGTGGAGTCTGGGGGAGGCTTG |
| | encoding F0103265B04 | GTGCAGCCTGGGGGGTCTCTGAGACTCTCCTGTG |
| | | CAGCCCCTAGTTTCATCTTCAGCAACAATTACAT |
| | | GGAGTGGTACCGGCAGGCTCCAGGGAAGCAGCG |
| | | CGACTGGGTCGCACGTATTACAGGTCGCGGTAAC |
| | | ACAAACTATCTGGACTCCGTGAAGGGCCGATTCA |
| | | CCATCTCCAGAGACGACGCCAAGAATACGGTGT |
| | | ATCTAGAAATCGACAGCCTGAAACCTGAGGACA |
| | | CGGCCGTCTATTACTGTAGTGCACTCTGGTACGG |
| | | CGGGCGCGCATGGGGCAAAGGGACCCTGGTCAC |
| | | CGTCTCCTCA |
| 277 | Nucleotide sequence | GAGGTGCAATTGGTGGAGTCTGGGGGAGGCTTG |
| | encoding F0103275B05 | GTGCAGCCTGGGGGGTCTCTGAGACTCTCCTGTG |
| | | CAGCCTCTGGAAGCATCTTCAATATCAACAGTAT |
| | | GGCCTGGTATCGCCGGGCTCCAGGGAAGCAGCG |
| | | CGAATTGGTCGCAAGTAGCACCAATGGTGGTAGT |
| | | ACAAACTATGCAGACTCCGTGAAGGGCCGATTC |
| | | ACCATCTCTAGAGACAACGCCAAACGGGTGTATC |
| | | TGCAAATGAACAGCCTGACACCTGAGGACACGG |
| | | CCGTCTATTATTGTAATGCACTGCTACAACCGTC |
| | | GATTTATGACATTAGTCGCACATATTGGGGCCAG |
| | | GGGACCCTGGTCACCGTCTCCTCA |
| 278 | Nucleotide sequence | GAGGTGCAATTGGTGGAGTCTGGGGGAGGATTG |
| | encoding F0103362B08 | GTGCAGGCTGGGGGCTCTCTGAGACTCTCCTGTG |
| | | CAGCCTCTGTACGTCCCTTCAGTACCTCAGCCAT |
| | | GGGCTGGTTCCGCCAGGCTCCAGAGAAGGAGCG |
| | | TGAGGCTGTAGCAGGTATTCTGTGGAATGGTATT |
| | | GTCACATACTATGCAGACTCCGTGAAGGGCCGAT |
| | | TCACCATCTCCAGAGACAACGCCAAGAATGAAG |
| | | TATATCTGCAAATGAACAAACTGAAACCCGAGG |
| | | ACACGGCCGTTTATTATTGTGCATTAGATAGAGA |
| | | TTATGGTGGGCGATCTTTTTCGGCATATGAATAT |
| | | GAGTACTGGGGCCAGGGGACCCTGGTCACCGTCT |
| | | CCTCA |
| 279 | Nucleotide sequence | GAGGTGCAATTGGTGGAGTCTGGGGGAGGCTTG |
| | encoding F0103387G04 | GCGCAGCCTGGGGGGTCTCTGAGACTCTCCTGTG |
| | | CAGCCTCTGGACCCGTCTTCAATATCAACAAGAT |
| | | GGCCTGGTACCGCCGGGCTCCAGGGAAGCAGCG |
| | | CGAATTGGTCGCAAGTGTCACCCCTACTGGTAGT |
| | | ATAAGTTATACTGACTCCGTGAAGGGCCGATTCA |
| | | CCATTTCTAGAGACGGCTCCAAGCGGTGGTCTCT |
| | | ACAAATGAACAGCCTGACACCTGAGGACACGGC |
| | | CGTCTATTACTGTAACGCTTTACTACAACCGGAT |
| | | AGTTATTCTAATACGCGCACATATTGGGGCCAGG |
| | | GGACCCTGGTCACCGTCTCCTCA |
| 280 | Nucleotide sequence | GAGGTGCAATTGGTGGAGTCTGGGGGAGGCTTG |
| | encoding F0103387G05 | GTGCAGGCTGGGGGGTCACTGAGACTCTCCTGTG |
| | | ACGCCTCTGGAAGGATCCTCCGTATCGGCTACAT |
| | | GAGGTGGCACCGCCAGGGTGCAGGGAAGCAGCG |
| | | CGAGTTTGTCGCGCGTATTACTGATGATAGTGCT |
| | | ACAGACTATGCAGACTCCGTGAAGGGCCGATTC |
| | | ACCATCTCCAGAGACAACGCCAAGAACACGGTG |
| | | TATCTGCAAATGAACAACCTGAATCCTGAGGACA |
| | | CGGCCGTCTATTATTGTGAGGCGTTGGTGACTGC |
| | | GAGTGTACGTGGTGGGAGTATACATTCTGGTACC |
| | | TATTGGGGCCGGGGGACCCTGGTCACCGTCTCCT |
| | | CA |
| 281 | Nucleotide sequence | GAGGTGCAATTGGTGGAGTCTGGGGGAGGATTG |
| | encoding F0103454D07 | GTGCAGCCTGGAGGATCACTTAGACTGTCCTGTG |
| | | TAGCCTCCGGGGGCATCATCAATATCAATTACAT |
| | | TGCCTGGTACCGCCAGACTCCAGGGAAGCAGCG |
| | | CGACTTGGTCGCTCGTATTAGTAGTGATGATACA |
| | | ATAAAGTATGGCGACTCCGTGAAGGGCCGATTC |
| | | GCCATGTCCAGAGACAAGGTCAAGAATATGGTG |
| | | CATCTACAAATGAACAGCCTGACTACCGAGGAC |
| | | ACAGGTGTCTATGTCTGTTCAGCCCTCATCACGC |
| | | CTTGGACAGGAGACACCCGGACCTATTGGGGCC |
| | | GGGGGACCCTGGTCACCGTCTCCTCA |
| 282 | Nucleotide sequence | GAGGTGCAATTGGTGGAGTCTGGGGGAGGATTG |
| | encoding F0103464B09 | GTGCAGCCTGGAGGATCACTAAGACTGTCCTGTG |
| | | CAACAACCTCTAGAGCTTTCATCAGGGACGTTTT |
| | | CACGGGCTGGTATCGCCGGGTTCCCGGGAAGGA |
| | | GCGCGAATTGGTCGCTCGCATTTACAATGGCGGT |
| | | AACACAAATTATGCAGACTTCGCGAAGGGCCGA |
| | | TTCTCCATCTCCAGGGACAACGCCAAGAAGATGG |
| | | TGACTCTGAGAATGAGCAATCTGAAACCTGAGG |
| | | ACACAGGGGTCTATTACTGCCTTTTTTCGGGTAC |
| | | AATCAATACTGGCAGAGAGTATCGGTCTGGAGA |
| | | CTACTGGGGCCAGGGGACCCTGGTCACCGTCTCC |
| | | TCA |
| 283 | Nucleotide sequence | GAGGTGCAATTGGTGGAGTCTGGGGGAGGCTTG |
| | encoding F0103464B09 | GTGCAGCCTGGGGGGTCTCTGAGACTCTCCTGTG |
| | | CAGCCTCTGGAAGCATCTTCAATATCAACCGCAT |
| | | GGCCTGGTATCGCCGGGCTCCAGGGAAGCAGCG |
| | | CGAATTGGTCGCATATAGCACCAATGGTGGTGAT |
| | | ACAAACTATGCAGACTCCGTGAAGGGCCGATTC |
| | | ACCATCAGCAGAGACAACGCCAAACGGGTGTAT |
| | | CTGCAAATGAACAGCCTGACACCTGAGGACACG |
| | | GCCGTCTATTATTGTCGCGCACTGCTACAACCGT |
| | | CGATTTATGACATTAGTCGCACATATTGGGGCCA |
| | | GGGGACCCTGGTCACCGTCTCCTCA |
| 284 | Nucleotide sequence | GAGGTGCAATTGGTGGAGTCTGGGGGAGGCGTT |
| | encoding F010301635 | GTGCAGCCTGGGGGGTCTCTGAGACTCTCCTGTG |
| | | CAGCCTCTGGAAGCATCTTCAATATCAACAGTAT |
| | | GGCCTGGTATCGCCAGGCTCCAGGGAAGCAGCG |
| | | CGAATTGGTCGCAAGTAGCACCAATGGTGGTAGT |
| | | ACAAACTATGCAGACTCCGTGAAGGGCCGATTC |
| | | ACCATCTCCAGAGACAACGCCAAACGGGTGTAT |
| | | CTGCAAATGAACAGCCTGCGCCCTGAGGACACG |
| | | GCCCTGTATTATTGTAATGCACTGCTACAACCGT |
| | | CGATTTATGACATTAGTCGCACATATTGGGGCCA |
| | | GGGGACCCTGGTCACCGTCTCCTCA |
| 285 | Nucleotide sequence | GAGGTGCAATTGGTGGAGTCTGGGGGAGGCGTT |
| | encoding F010301636 | GTGCAGCCTGGGGGGTCTCTGAGACTCTCCTGTG |
| | | CAGCCTCTGGAAGCATCTTCAATATCAACAGTAT |
| | | GGCCTGGTATCGCCGGGCTCCAGGGAAGCAGCG |
| | | CGAATTGGTCGCAAGTAGCACCAATGGTGGTAGT |
| | | ACAAACTATGCAGACTCCGTGAAGGGCCGATTC |
| | | ACCATCTCCAGAGACAACGCCAAAAACGTGTAT |
| | | CTGCAAATGAACAGCCTGCGCCCTGAGGACACG |
| | | GCCCTGTATTATTGTAATGCACTGCTACAACCGT |
| | | CGATTTATGACATTAGTCGCACATATTGGGGCCA |
| | | GGGGACCCTGGTCACCGTCTCCTCA |
| 286 | Nucleotide sequence | GAGGTGCAATTGGTGGAGTCTGGGGGAGGCGTT |
| | encoding F010301637 | GTGCAGCCTGGGGGGTCTCTGAGACTCTCCTGTG |
| | | CAGCCTCTGGAAGCATCTTCAATATCAACAGTAT |
| | | GGCCTGGTATCGCCGGGCTCCAGGGAAGCAGCG |
| | | CGAATTGGTCGCAAGTAGCACCAATGGTGGTAGT |
| | | ACAAACTATGCAGACTCCGTGAAGGGCCGATTC |
| | | ACCATCTCCAGAGACAACGCCAAACGGGTGTAT |
| | | CTGCAAATGAACAGCCTGCGCCCTGAGGACACG |
| | | GCCCTGTATTATTGTAATGCACTGCTACAACCGT |
| | | CGATTTATGACATTAGTCGCACATATTGGGGCCA |
| | | GGGGACCCTGGTCACCGTCTCCTCA |
| 287 | Nucleotide sequence | GAGGTGCAATTGGTGGAGTCTGGGGGAGGCGTT |
| | encoding F010301638 | GTGCAGCCTGGGGGGTCTCTGAGACTCTCCTGTG |
| | | CAGCCTCTGGAAGCATCTTCAATATCAACAGTAT |
| | | GGCCTGGTATCGCCAGGCTCCAGGGAAGCAGCG |
| | | CGAATTGGTCGCAAGTAGCACCAATGGTGGTAGT |
| | | ACAAACTATGCAGACTCCGTGAAGGGCCGATTC |
| | | ACCATCTCCAGAGACAACGCCAAAAACGTGTAT |
| | | CTGCAAATGAACAGCCTGCGCCCTGAGGACACG |
| | | GCCCTGTATTATTGTAATGCACTGCTACAACCGT |
| | | CGATTTATGACATTAGTCGCACATATTGGGGCCA |
| | | GGGGACCCTGGTCACCGTCTCCTCA |
| 288 | Nucleotide sequence | GAGGTGCAATTGGTGGAGTCTGGGGGAGGCGTT |
| | encoding F010301639 | GTGCAGCCTGGGGGGTCTCTGAGACTCTCCTGTG |
| | | CAGCCTCTGGAAGCATCTTCAATATCAACAGTAT |
| | | GGCCTGGTATCGCCAGGCTCCAGGGAAGCAGCG |
| | | CGAATTGGTCGCAAGTAGCACCAATGGTGGTAGT |
| | | ACAAACTATGCAGACTCCGTGAAGGGCCGATTC |
| | | ACCATCTCCAGAGACAACGCCAAACGGACCGTG |
| | | TATCTGCAAATGAACAGCCTGCGCCCTGAGGACA |
| | | CGGCCCTGTATTATTGTAATGCACTGCTACAACC |
| | | GTCGATTTATGACATTAGTCGCACATATTGGGGC |
| | | CAGGGGACCCTGGTCACCGTCTCCTCA |
| 289 | Nucleotide sequence | GAGGTGCAATTGGTGGAGTCTGGGGGAGGCGTT |
| | encoding F010301640 | GTGCAGCCTGGGGGGTCTCTGAGACTCTCCTGTG |
| | | CAGCCTCTGGAAGCATCTTCAATATCAACAGTAT |
| | | GGCCTGGTATCGCCGGGCTCCAGGGAAGCAGCG |
| | | CGAATTGGTCGCAAGTAGCACCAATGGTGGTAGT |
| | | ACAAACTATGCAGACTCCGTGAAGGGCCGATTC |
| | | ACCATCTCCAGAGACAACGCCAAACGGACCGTG |
| | | TATCTGCAAATGAACAGCCTGCGCCCTGAGGACA |
| | | CGGCCCTGTATTATTGTAATGCACTGCTACAACC |
| | | GTCGATTTATGACATTAGTCGCACATATTGGGGC |
| | | CAGGGGACCCTGGTCACCGTCTCCTCA |
| 290 | Nucleotide sequence | GAGGTGCAATTGGTGGAGTCTGGGGGAGGCGTT |
| | encoding F010301641 | GTGCAGCCTGGGGGGTCTCTGAGACTCTCCTGTG |
| | | CAGCCTCTGGAAGCATCTTCAATATCAACAGTAT |
| | | GGCCTGGTATCGCCGGGCTCCAGGGAAGCAGCG |
| | | CGAATTGGTCGCAAGTAGCACCAATGGTGGTAGT |
| | | ACAAACTATGCAGACTCCGTGAAGGGCCGATTC |
| | | ACCATCTCCAGAGACAACGCCAAAAACACCGTG |
| | | TATCTGCAAATGAACAGCCTGCGCCCTGAGGACA |
| | | CGGCCCTGTATTATTGTAATGCACTGCTACAACC |
| | | GTCGATTTATGACATTAGTCGCACATATTGGGGC |
| | | CAGGGGACCCTGGTCACCGTCTCCTCA |
| 291 | Nucleotide sequence | GAGGTGCAATTGGTGGAGTCTGGGGGAGGCGTT |
| | encoding F010301642 | GTGCAGCCTGGGGGGTCTCTGAGACTCTCCTGTG |
| | | CAGCCTCTGGAAGCATCTTCAATATCAACAGTAT |
| | | GGCCTGGTATCGCCAGGCTCCAGGGAAGCAGCG |
| | | CGAATTGGTCGCAAGTAGCACCAATGGTGGTAGT |
| | | ACAAACTATGCAGACTCCGTGAAGGGCCGATTC |
| | | ACCATCTCCAGAGACAACGCCAAAAACACCGTG |
| | | TATCTGCAAATGAACAGCCTGCGCCCTGAGGACA |
| | | CGGCCCTGTATTATTGTAATGCACTGCTACAACC |
| | | GTCGATTTATGACATTAGTCGCACATATTGGGGC |
| | | CAGGGGACCCTGGTCACCGTCTCCTCA |
| 292 | Nucleotide sequence | GAGGTGCAATTGGTGGAGTCTGGGGGAGGCGTT |
| | encoding F010301652 | GTGCAGCCTGGGGGGTCTCTGAGACTCTCCTGTG |
| | | CAGCCTCTGGAAGCATCTTCAATATCAACCGCAT |
| | | GGCCTGGTATCGCCGGGCTCCAGGGAAGCAGCG |
| | | CGAATTGGTCGCATATAGCACCAATGGTGGTGAT |
| | | ACAAACTATGCAGACTCCGTGAAGGGCCGATTC |
| | | ACCATCTCCAGAGACAACGCCAAAAACGTGTAT |
| | | CTGCAAATGAACAGCCTGCGCCCTGAGGACACG |
| | | GCCCTGTATTATTGTCGCGCACTGCTACAACCGT |
| | | CGATTTATGACATTAGTCGCACATATTGGGGCCA |
| | | GGGGACCCTGGTCACCGTCTCCTCA |
| 293 | Nucleotide sequence | GAGGTGCAATTGGTGGAGTCTGGGGGAGGCGTT |
| | encoding F010301653 | GTGCAGCCTGGGGGGTCTCTGAGACTCTCCTGTG |
| | | CAGCCTCTGGAAGCATCTTCAATATCAACCGCAT |
| | | GGCCTGGTATCGCCGGGCTCCAGGGAAGCAGCG |
| | | CGAATTGGTCGCATATAGCACCAATGGTGGTGAT |
| | | ACAAACTATGCAGACTCCGTGAAGGGCCGATTC |
| | | ACCATCTCCAGAGACAACGCCAAACGGGTGTAT |
| | | CTGCAAATGAACAGCCTGCGCCCTGAGGACACG |
| | | GCCCTGTATTATTGTCGCGCACTGCTACAACCGT |
| | | CGATTTATGACATTAGTCGCACATATTGGGGCCA |
| | | GGGGACCCTGGTCACCGTCTCCTCA |
| 294 | Nucleotide sequence | GAGGTGCAATTGGTGGAGTCTGGGGGAGGCGTT |
| | encoding F010301654 | GTGCAGCCTGGGGGGTCTCTGAGACTCTCCTGTG |
| | | CAGCCTCTGGAAGCATCTTCAATATCAACCGCAT |
| | | GGCCTGGTATCGCCAGGCTCCAGGGAAGCAGCG |
| | | CGAATTGGTCGCATATAGCACCAATGGTGGTGAT |
| | | ACAAACTATGCAGACTCCGTGAAGGGCCGATTC |
| | | ACCATCTCCAGAGACAACGCCAAACGGGTGTAT |
| | | CTGCAAATGAACAGCCTGCGCCCTGAGGACACG |
| | | GCCCTGTATTATTGTCGCGCACTGCTACAACCGT |
| | | CGATTTATGACATTAGTCGCACATATTGGGGCCA |
| | | GGGGACCCTGGTCACCGTCTCCTCA |
| 295 | Nucleotide sequence | GAGGTGCAATTGGTGGAGTCTGGGGGAGGCGTT |
| | encoding F010301655 | GTGCAGCCTGGGGGGTCTCTGAGACTCTCCTGTG |
| | | CAGCCTCTGGAAGCATCTTCAATATCAACCGCAT |
| | | GGCCTGGTATCGCCAGGCTCCAGGGAAGCAGCG |
| | | CGAATTGGTCGCATATAGCACCAATGGTGGTGAT |
| | | ACAAACTATGCAGACTCCGTGAAGGGCCGATTC |
| | | ACCATCTCCAGAGACAACGCCAAAAACGTGTAT |
| | | CTGCAAATGAACAGCCTGCGCCCTGAGGACACG |
| | | GCCCTGTATTATTGTCGCGCACTGCTACAACCGT |
| | | CGATTTATGACATTAGTCGCACATATTGGGGCCA |
| | | GGGGACCCTGGTCACCGTCTCCTCA |
| 296 | Nucleotide sequence | GAGGTGCAATTGGTGGAGTCTGGGGGAGGCTTGGTGC |
| | encoding F010301556 | AGGCTGGGGGGTCACTGAGACTCTCCTGTGCTGCCTC |
| | | TGGAAGAATCCTCCGTATCGGCTACATGAGGTGGCAC |
| | | CGCCAGGGTGCAGGGAAGCAGCGCGAGTTTGTCGCG |
| | | CGTATTACTGGTGGTAGTGCTACAGGCTATGCAGACT |
| | | CCGTGAAGGGCCGATTCACCATCTCCAGAGACAACGC |
| | | CAAGAACACGGTGTATCTGCAAATGAACAACCTGAAT |
| | | CCTGAGGACACGGCCGTCTATTATTGTGAGGCGTTGG |
| | | TGACTGCGAGTGTACGTGGTGGGAGTATACATTCTGG |
| | | AACCTATTGGGGCCGGGGGACCCTGGTCACCGTCTCC |
| | | TCA |
| 297 | Nucleotide sequence | GAGGTGCAATTGGTGGAGTCTGGGGGAGGCTTGGTGC |
| | encoding F010301563 | AGGCTGGGGGGTCACTGAGACTCTCCTGTGCTGCCTC |
| | | TGGAAGAATCCTCCGTATCGGCTACATGAGGTGGCAC |
| | | CGCCAGGGTGCAGGGAAGCAGCGCGAGTTTGTCGCG |
| | | CGTATTACTGATGATAGTGCTACAGGCTATGCAGACT |
| | | CCGTGAAGGGCCGATTCACCATCTCCAGAGACAACGC |
| | | CAAGAACACGGTGTATCTGCAAATGAACAACCTGAAT |
| | | CCTGAGGACACGGCCGTCTATTATTGTGAGGCGTTGG |
| | | TGACTGCGAGTGTACGTGGTGGGAGTATACATTCTGG |
| | | AACCTATTGGGGCCGGGGGACCCTGGTCACCGTCTCC |
| | | TCA |
| 298 | Nucleotide sequence | GAGGTGCAATTGGTGGAGTCTGGGGGAGGCGTGGTG |
| | encoding F010301849 | CAGCCTGGGGGGTCACTGAGACTCTCCTGTGATGCCT |
| | | CTGGAAGGATACTCCGTATCGGCTACATGAGGTGGCA |
| | | CCGCCAGGGTGCAGGGAAGCAGCGCGAGTTTGTCGC |
| | | GCGTATTACTGATGATAGTGCTACAGACTATGCAGAC |
| | | TCCGTGAAGGGCCGATTCACCATCTCCAGAGACAACG |
| | | CCAAGAACACGGTGTATCTGCAAATGAACTCCCTGCG |
| | | ACCTGAGGACACGGCCCTCTATTATTGTGAGGCGTTG |
| | | GTGACTGCGAGTGTACGTGGTGGGAGTATACATTCTG |
| | | GAACCTATTGGGGCCAGGGGACCCTGGTCACCGTCTC |
| | | CTCA |
| 299 | Nucleotide sequence | GAGGTGCAATTGGTGGAGTCTGGGGGAGGCGTCGTG |
| | encoding F010301850 | CAGCCGGGGGGGTCACTGAGACTCTCCTGTGCGGCCA |
| | | GCGGAAGGATTCTCCGTATCGGCTACATGAGGTGGTA |
| | | TCGCCAGGCGCCGGGGAAGCAGCGCGAGTTTGTCGC |
| | | GCGTATTACTGATGATAGTGCTACAGGTTATGCAGAC |
| | | TCCGTGAAGGGCCGATTCACCATCTCCAGAGACAACG |
| | | CCAAGAACACGGTGTATCTGCAAATGAACAGCCTGCG |
| | | CCCTGAGGACACGGCCCTGTATTATTGTGAGGCGTTG |
| | | GTGACTGCGAGTGTACGTGGTGGGAGTATACATTCTG |
| | | GCACCTATTGGGGCCAGGGGACCCTGGTCACCGTCTC |
| | | CTCA |
| 300 | Nucleotide sequence | GAGGTGCAATTGGTGGAGTCTGGGGGAGGCGTGGTG |
| | encoding F010301643 | CAGCCTGGGGGGTCACTGAGACTCTCCTGTGCCGCCT |
| | | CTGGAAGGATACTCCGTATCGGCTACATGAGGTGGCA |
| | | CCGCCAGGGTGCAGGGAAGCAGCGCGAGTTTGTCGC |
| | | GCGTATTACTGATGATAGTGCTACAGACTATGCAGAC |
| | | TCCGTGAAGGGCCGATTCACCATCTCCAGAGACAACG |
| | | CCAAGAACACGGTGTATCTGCAAATGAACTCCCTGCG |
| | | ACCTGAGGACACGGCCCTCTATTATTGTGAGGCGTTG |
| | | GTGACTGCGAGTGTACGTGGTGGGAGTATACATTCTG |
| | | GAACCTATTGGGGCCAGGGGACCCTGGTCACCGTCTC |
| | | CTCA |
| 301 | Nucleotide sequence | GAGGTGCAATTGGTGGAGTCTGGGGGAGGCGTGGTG |
| | encoding F010301644 | CAGCCTGGGGGGTCACTGAGACTCTCCTGTGATGCCT |
| | | CTGGAAGGATACTCCGTATCGGCTACATGAGGTGGTA |
| | | TCGCCAGGGTGCAGGGAAGCAGCGCGAGTTTGTCGC |
| | | GCGTATTACTGATGATAGTGCTACAGACTATGCAGAC |
| | | TCCGTGAAGGGCCGATTCACCATCTCCAGAGACAACG |
| | | CCAAGAACACGGTGTATCTGCAAATGAACTCCCTGCG |
| | | ACCTGAGGACACGGCCCTCTATTATTGTGAGGCGTTG |
| | | GTGACTGCGAGTGTACGTGGTGGGAGTATACATTCTG |
| | | GAACCTATTGGGGCCAGGGGACCCTGGTCACCGTCTC |
| | | CTCA |
| 302 | Nucleotide sequence | GAGGTGCAATTGGTGGAGTCTGGGGGAGGCGTGGTG |
| | encoding F010301645 | CAGCCTGGGGGGTCACTGAGACTCTCCTGTGATGCCT |
| | | CTGGAAGGATACTCCGTATCGGCTACATGAGGTGGCA |
| | | CCGCCAGGCTGCAGGGAAGCAGCGCGAGTTTGTCGC |
| | | GCGTATTACTGATGATAGTGCTACAGACTATGCAGAC |
| | | TCCGTGAAGGGCCGATTCACCATCTCCAGAGACAACG |
| | | CCAAGAACACGGTGTATCTGCAAATGAACTCCCTGCG |
| | | ACCTGAGGACACGGCCCTCTATTATTGTGAGGCGTTG |
| | | GTGACTGCGAGTGTACGTGGTGGGAGTATACATTCTG |
| | | GAACCTATTGGGGCCAGGGGACCCTGGTCACCGTCTC |
| | | CTCA |
| 303 | Nucleotide sequence | GAGGTGCAATTGGTGGAGTCTGGGGGAGGCGTGGTG |
| | encoding F010301646 | CAGCCTGGGGGGTCACTGAGACTCTCCTGTGATGCCT |
| | | CTGGAAGGATACTCCGTATCGGCTACATGAGGTGGCA |
| | | CCGCCAGGGTCCAGGGAAGCAGCGCGAGTTTGTCGC |
| | | GCGTATTACTGATGATAGTGCTACAGACTATGCAGAC |
| | | TCCGTGAAGGGCCGATTCACCATCTCCAGAGACAACG |
| | | CCAAGAACACGGTGTATCTGCAAATGAACTCCCTGCG |
| | | ACCTGAGGACACGGCCCTCTATTATTGTGAGGCGTTG |
| | | GTGACTGCGAGTGTACGTGGTGGGAGTATACATTCTG |
| | | GAACCTATTGGGGCCAGGGGACCCTGGTCACCGTCTC |
| | | CTCA |
| 304 | Nucleotide sequence | GAGGTGCAATTGGTGGAGTCTGGGGGAGGCGTGGTG |
| | encoding F010301647 | CAGCCTGGGGGGTCACTGAGACTCTCCTGTGATGCCT |
| | | CTGGAAGGATACTCCGTATCGGCTACATGAGGTGGCA |
| | | CCGCCAGGGTGCAGGGAAGCAGCGCGAGCTTGTCGC |
| | | GCGTATTACTGATGATAGTGCTACAGACTATGCAGAC |
| | | TCCGTGAAGGGCCGATTCACCATCTCCAGAGACAACG |
| | | CCAAGAACACGGTGTATCTGCAAATGAACTCCCTGCG |
| | | ACCTGAGGACACGGCCCTCTATTATTGTGAGGCGTTG |
| | | GTGACTGCGAGTGTACGTGGTGGGAGTATACATTCTG |
| | | GAACCTATTGGGGCCAGGGGACCCTGGTCACCGTCTC |
| | | CTCA |
| 305 | Nucleotide sequence | GAGGTGCAATTGGTGGAGTCTGGGGGAGGCGTGGTG |
| | encoding F010301648 | CAGCCTGGGGGGTCACTGAGACTCTCCTGTGATGCCT |
| | | CTGGAAGGATACTCCGTATCGGCTACATGAGGTGGCA |
| | | CCGCCAGGGTGCAGGGAAGCAGCGCGAGTTTGTCGC |
| | | GCGTATTACTGATGATAGTGCTACAGACTATGCAGAC |
| | | TCCGTGAAGGGCCGATTCACCATCTCCAGAGACAACG |
| | | CCAAGAACACGGTGTATCTGCAAATGAACTCCCTGCG |
| | | ACCTGAGGACACGGCCCTCTATTATTGTAACGCGTTG |
| | | GTGACTGCGAGTGTACGTGGTGGGAGTATACATTCTG |
| | | GAACCTATTGGGGCCAGGGGACCCTGGTCACCGTCTC |
| | | CTCA |
| 306 | Nucleotide sequence | GAGGTGCAATTGGTGGAGTCTGGGGGAGGCGTCGTG |
| | encoding F010301649 | CAGCCGGGGGGGTCACTGAGACTCTCCTGTGCGGCCA |
| | | GCGGAAGGATTCTCCGTATCGGCTACATGAGGTGGCA |
| | | CCGCCAGGCGCCGGGGAAGCAGCGCGAGTTTGTCGC |
| | | GCGTATTACTGATGATAGTGCTACAGGTTATGCAGAC |
| | | TCCGTGAAGGGCCGATTCACCATCTCCAGAGACAACG |
| | | CCAAGAACACGGTGTATCTGCAAATGAACAGCCTGCG |
| | | CCCTGAGGACACGGCCCTGTATTATTGTGAGGCGTTG |
| | | GTGACTGCGAGTGTACGTGGTGGGAGTATACATTCTG |
| | | GCACCTATTGGGGCCAGGGGACCCTGGTCACCGTCTC |
| | | CTCA |
| 307 | Nucleotide sequence | GAGGTGCAATTGGTGGAGTCTGGGGGAGGCGTCGTG |
| | encoding F010302307 | CAGCCGGGGGGGTCACTGAGACTCTCCTGTGCGGCCA |
| | | GCGGAAGGATTCTCCGTATCGGCTACATGAGGTGGTA |
| | | TCGCCAGGCGCCGGGGAAGCAGCGCGAGTTTGTCGC |
| | | GCGTATTACTGATGATAGTGCTACAGGTTATGCAGAC |
| | | TCCGTGAAGGGCCGATTCACCATCTCCAGAGACGCGG |
| | | CCAAGAACACGGTGTATCTGCAAATGAACAGCCTGCG |
| | | CCCTGAGGACACGGCCCTGTATTATTGTGAGGCGTTG |
| | | GTGACTGCGAGTGTACGTGGTGGGAGTATACATTCTG |
| | | GCACCTATTGGGGCCAGGGGACCCTGGTCACCGTCTC |
| | | CTCA |
| 308 | Nucleotide sequence | GAGGTGCAATTGGTGGAGTCTGGGGGAGGCGTCGTG |
| | encoding F010302308 | CAGCCGGGGGGGTCACTGAGACTCTCCTGTGCGGCCA |
| | | GCGGAAGGATTCTCCGTATCGGCTACATGAGGTGGTA |
| | | TCGCCAGGCGCCGGGGAAGCAGCGCGAGTTTGTCGC |
| | | GCGTATTACTGATGATAGTGCTACAGGTTATGCAGAC |
| | | TCCGTGAAGGGCCGATTCACCATCTCCAGAGACTATG |
| | | CCAAGAACACGGTGTATCTGCAAATGAACAGCCTGCG |
| | | CCCTGAGGACACGGCCCTGTATTATTGTGAGGCGTTG |
| | | GTGACTGCGAGTGTACGTGGTGGGAGTATACATTCTG |
| | | GCACCTATTGGGGCCAGGGGACCCTGGTCACCGTCTC |
| | | CTCA |
| 309 | Nucleotide sequence | GAGGTGCAATTGGTGGAGTCTGGGGGAGGCGTCGTG |
| | encoding F010302309 | CAGCCGGGGGGGTCACTGAGACTCTCCTGTGCGGCCA |
| | | GCGGAAGGATTCTCCGTATCGGCTACATGAGGTGGTA |
| | | TCGCCAGGCGCCGGGGAAGCAGCGCGAGTTTGTCGC |
| | | GCGTATTACTGATGATAGTGCTACAGGTTATGCAGAC |
| | | TCCGTGAAGGGCCGATTCACCATCTCCAGAGACCAGG |
| | | CCAAGAACACGGTGTATCTGCAAATGAACAGCCTGCG |
| | | CCCTGAGGACACGGCCCTGTATTATTGTGAGGCGTTG |
| | | GTGACTGCGAGTGTACGTGGTGGGAGTATACATTCTG |
| | | GCACCTATTGGGGCCAGGGGACCCTGGTCACCGTCTC |
| | | CTCA |
| 310 | Nucleotide sequence | GAGGTGCAATTGGTGGAGTCTGGTGGTGGAGTTGTTC |
| | encoding F010302391 | AACCCGGTGGTTCTTTGAGATTGTCTTGCGCCGCTTCC |
| | | GGTAGAATCTTGCGTATCGGTTACATGCGTTGGTATA |
| | | GACAAGCTCCCGGTAAGCAAAGAGAGTTCGTCGCCA |
| | | GAATCACCGGAGGTTCTGCTACTGGTTATGCTGATTC |
| | | CGTCAAGGGAAGATTTACCATCTCCAGAGACAACGCT |
| | | AAGAACACTGTTTATTTGCAAATGAACTCCTTGAGAC |
| | | CCGAAGATACCGCTTTGTACTACTGCGAGGCTTTGGT |
| | | CACTGCTTCCGTTAGAGGAGGATCTATCCACTCCGGT |
| | | ACTTACTGGGGTCAAGGAACCCTGGTCACCGTCTCCT |
| | | CA |
| 311 | Nucleotide sequence | GAGGTGCAATTGGTGGAGTCTGGTGGTGGTGTTGTTC |
| | encoding F010302392 | AGCCCGGTGGTTCCTTGAGATTGTCTTGTGCTGCTTCC |
| | | GGTAGAATCTTGAGAATCGGTTACATGAGATGGTACA |
| | | GACAAGCCCCCGGTAAGCAGAGAGAGTTCGTCGCCA |
| | | GAATCACTGGAGGATCTGCTACTGGTTACGCTGACTC |
| | | CGTCAAGGGAAGATTCACCATCTCCAGAGATCAAGCT |
| | | AAGAACACCGTCTACTTGCAGATGAACTCCTTGAGAC |
| | | CAGAGGACACCGCTTTGTACTACTGTGAGGCTTTAGT |
| | | TACTGCTTCCGTTAGAGGTGGTTCCATTCACTCTGGTA |
| | | CTTACTGGGGTCAAGGAACCCTGGTCACCGTCTCCTC |
| | | A |
| 312 | Nucleotide sequence | GAGGTGCAATTGGTGGAGTCTGGGGGAGGAGTGGTG |
| | encoding F010301868 | CAGCCTGGAGGATCACTAAGACTGTCCTGTGCAACAA |
| | | CCAGCAGAGCTTTCATCAGGGACGTTTTCACGGGCTG |
| | | GTATCGCCGGGTTCCCGGGAAGGAGCGCGAATTGGTC |
| | | GCTCGCATTTACAATGGCGGTAACACAAATTATGCAG |
| | | ACTTCGCGAAGGGCCGATTCACCATCTCCAGGGACAA |
| | | CGCCAAGAAGATGGTGTATCTGCAAATGAACAGCCTG |
| | | CGCCCTGAGGACACAGCGCTGTATTACTGCCTTTTTTC |
| | | GGGTACAATCAATACTGGCAGAGAGTATCGGTCTGGA |
| | | GACTACTGGGGCCAGGGGACCCTGGTCACCGTCTCCT |
| | | CA |
| 313 | Nucleotide sequence | GAGGTGCAATTGGTGGAGTCTGGGGGAGGAGTGGTG |
| | encoding F010301869 | CAGCCTGGAGGATCACTAAGACTGTCCTGTGCAACAA |
| | | CCAGCAGAGCTTTCATCAGGGACGTTTTCACGGGCTG |
| | | GTATCGCCGGGTTCCCGGGAAGGAGCGCGAATTGGTC |
| | | GCTCGCATTTACAATGGCGGTAACACAAATTATGCAG |
| | | ACTTCGCGAAGGGCCGATTCACCATCTCCAGGGACAA |
| | | CGCCAAGAAAACCGTGTATCTGCAAATGAACAGCCTG |
| | | CGCCCTGAGGACACAGCGCTGTATTACTGCCTTTTTTC |
| | | GGGTACAATCAATACTGGCAGAGAGTATCGGTCTGGA |
| | | GACTACTGGGGCCAGGGGACCCTGGTCACCGTCTCCT |
| | | CA |
| 314 | Nucleotide sequence | GAGGTGCAATTGGTGGAGTCTGGGGGAGGAGTGGTG |
| | encoding F010301870 | CAGCCTGGAGGATCACTAAGACTGTCCTGTGCAACAA |
| | | CCAGCAGAGCTTTCATCAGGGACGTTTTCACGGGCTG |
| | | GTATCGCCGGGTTCCCGGGAAGGAGCGCGAATTGGTC |
| | | GCTCGCATTTACAATGGCGGTAACACAAATTATGCAG |
| | | ACTTCGCGAAGGGCCGATTCACCATCTCCAGGGACAA |
| | | CGCCAAGAAGATGGTGTATCTGCAAATGAACAGCCTG |
| | | CGCCCTGAGGACACAGCGCTGTATTACTGCAACTTTT |
| | | CGGGTACAATCAATACTGGCAGAGAGTATCGGTCTGG |
| | | AGACTACTGGGGCCAGGGGACCCTGGTCACCGTCTCC |
| | | TCA |
| 315 | Nucleotide sequence | GAGGTGCAATTGGTGGAGTCTGGGGGAGGAGTGGTG |
| | encoding F010301871 | CAGCCTGGAGGATCACTAAGACTGTCCTGTGCAGCGA |
| | | CCAGCAGAGCTTTCATCAGGGACGTTTTCACGGGCTG |
| | | GTATCGCCGGGTTCCCGGGAAGGAGCGCGAATTGGTC |
| | | GCTCGCATTTACAATGGCGGTAACACAAATTATGCAG |
| | | ACTTCGCGAAGGGCCGATTCACCATCTCCAGGGACAA |
| | | CGCCAAGAAGATGGTGTATCTGCAAATGAACAGCCTG |
| | | CGCCCTGAGGACACAGCGCTGTATTACTGCCTTTTTTC |
| | | GGGTACAATCAATACTGGCAGAGAGTATCGGTCTGGA |
| | | GACTACTGGGGCCAGGGGACCCTGGTCACCGTCTCCT |
| | | CA |
| 316 | Nucleotide sequence | GAGGTGCAATTGGTGGAGTCTGGGGGAGGAGTGGTG |
| | encoding F010301872 | CAGCCTGGAGGATCACTAAGACTGTCCTGTGCAACAA |
| | | GCAGCAGAGCTTTCATCAGGGACGTTTTCACGGGCTG |
| | | GTATCGCCGGGTTCCCGGGAAGGAGCGCGAATTGGTC |
| | | GCTCGCATTTACAATGGCGGTAACACAAATTATGCAG |
| | | ACTTCGCGAAGGGCCGATTCACCATCTCCAGGGACAA |
| | | CGCCAAGAAGATGGTGTATCTGCAAATGAACAGCCTG |
| | | CGCCCTGAGGACACAGCGCTGTATTACTGCCTTTTTTC |
| | | GGGTACAATCAATACTGGCAGAGAGTATCGGTCTGGA |
| | | GACTACTGGGGCCAGGGGACCCTGGTCACCGTCTCCT |
| | | CA |
| 317 | Nucleotide sequence | GAGGTGCAATTGGTGGAGTCTGGGGGAGGAGTGGTG |
| | encoding F010301873 | CAGCCTGGAGGATCACTAAGACTGTCCTGTGCAACAA |
| | | CCAGCAGAGCTTTCATCAGGGACGTTTTCACGGGCTG |
| | | GTATCGCCAGGTTCCCGGGAAGGAGCGCGAATTGGTC |
| | | GCTCGCATTTACAATGGCGGTAACACAAATTATGCAG |
| | | ACTTCGCGAAGGGCCGATTCACCATCTCCAGGGACAA |
| | | CGCCAAGAAGATGGTGTATCTGCAAATGAACAGCCTG |
| | | CGCCCTGAGGACACAGCGCTGTATTACTGCCTTTTTTC |
| | | GGGTACAATCAATACTGGCAGAGAGTATCGGTCTGGA |
| | | GACTACTGGGGCCAGGGGACCCTGGTCACCGTCTCCT |
| | | CA |
| 318 | Nucleotide sequence | GAGGTGCAATTGGTGGAGTCTGGGGGAGGAGTGGTG |
| | encoding F010301874 | CAGCCTGGAGGATCACTAAGACTGTCCTGTGCAACAA |
| | | CCAGCAGAGCTTTCATCAGGGACGTTTTCACGGGCTG |
| | | GTATCGCCGGGCGCCCGGGAAGGAGCGCGAATTGGT |
| | | CGCTCGCATTTACAATGGCGGTAACACAAATTATGCA |
| | | GACTTCGCGAAGGGCCGATTCACCATCTCCAGGGACA |
| | | ACGCCAAGAAGATGGTGTATCTGCAAATGAACAGCCT |
| | | GCGCCCTGAGGACACAGCGCTGTATTACTGCCTTTTTT |
| | | CGGGTACAATCAATACTGGCAGAGAGTATCGGTCTGG |
| | | AGACTACTGGGGCCAGGGGACCCTGGTCACCGTCTCC |
| | | TCA |
| 319 | Nucleotide sequence | GAGGTGCAATTGGTGGAGTCTGGGGGAGGAGTGGTG |
| | encoding F010301875 | CAGCCTGGAGGATCACTAAGACTGTCCTGTGCAACAA |
| | | CCAGCAGAGCTTTCATCAGGGACGTTTTCACGGGCTG |
| | | GTATCGCCGGGTTCCCGGGAAGGAGCGCGAATTGGTC |
| | | GCTCGCATTTACAATGGCGGTAACACAAATTATGCAG |
| | | ACAGCGCGAAGGGCCGATTCACCATCTCCAGGGACA |
| | | ACGCCAAGAAGATGGTGTATCTGCAAATGAACAGCCT |
| | | GCGCCCTGAGGACACAGCGCTGTATTACTGCCTTTTTT |
| | | CGGGTACAATCAATACTGGCAGAGAGTATCGGTCTGG |
| | | AGACTACTGGGGCCAGGGGACCCTGGTCACCGTCTCC |
| | | TCA |
| 320 | Nucleotide sequence | GAGGTGCAATTGGTGGAGTCTGGGGGAGGAGTGGTG |
| | encoding F010301876 | CAGCCTGGAGGATCACTAAGACTGTCCTGTGCAACAA |
| | | CCAGCAGAGCTTTCATCAGGGACGTTTTCACGGGCTG |
| | | GTATCGCCGGGTTCCCGGGAAGGAGCGCGAATTGGTC |
| | | GCTCGCATTTACAATGGCGGTAACACAAATTATGCAG |
| | | ACTTCGTGAAGGGCCGATTCACCATCTCCAGGGACAA |
| | | CGCCAAGAAGATGGTGTATCTGCAAATGAACAGCCTG |
| | | CGCCCTGAGGACACAGCGCTGTATTACTGCCTTTTTTC |
| | | GGGTACAATCAATACTGGCAGAGAGTATCGGTCTGGA |
| | | GACTACTGGGGCCAGGGGACCCTGGTCACCGTCTCCT |
| | | CA |
| 321 | Nucleotide sequence | GAGGTGCAATTGGTGGAGTCTGGGGGAGGAGTGGTG |
| | encoding F010301877 | CAGCCTGGAGGATCACTAAGACTGTCCTGTGCAACAA |
| | | CCAGCAGAGCTTTCATCAGGGACGTTTTCACGGGCTG |
| | | GTATCGCCGGGTTCCCGGGAAGGAGCGCGAATTGGTC |
| | | GCTCGCATTTACAATGGCGGTAACACAAATTATGCAG |
| | | ACTTCGCGAAGGGCCGATTCACCATCTCCAGGGACAA |
| | | CGCCAAGAACATGGTGTATCTGCAAATGAACAGCCTG |
| | | CGCCCTGAGGACACAGCGCTGTATTACTGCCTTTTTTC |
| | | GGGTACAATCAATACTGGCAGAGAGTATCGGTCTGGA |
| | | GACTACTGGGGCCAGGGGACCCTGGTCACCGTCTCCT |
| | | CA |
| 322 | Nucleotide sequence | GAGGTGCAATTGGTGGAGTCTGGGGGAGGATTGGTG |
| | encoding F010301892 | CAGCCTGGAGGATCACTAAGACTGTCCTGTGCAACAA |
| | | CCTCTAGAGCTTTCATCAGGGACCTTTTCACGGGCTG |
| | | GTATCGCCGGGTTCCCGGGAAGGAGCGCGAATTGGTC |
| | | GCTCGCATTTACAATGGCGGTAACACAAATTATGCAG |
| | | ACTTCGCGAAGGGCCGATTCTCCATCTCCAGGGACAA |
| | | CGCCAAGAAGATGGTGACTCTGAGAATGAGCAATCT |
| | | GAAACCTGAGGACACAGGGGTCTATTACTGCCTTTTT |
| | | TCGGGTACAATCAATACTGGCAGAGAGTATCGGTCTG |
| | | GAGACTACTGGGGCCAGGGGACCCTGGTCACCGTCTC |
| | | CTCA |
| 323 | Nucleotide sequence | GAGGTGCAATTGGTGGAGTCTGGGGGAGGAGTGGTG |
| | encoding F010301893 | CAGCCTGGAGGATCACTAAGACTGTCCTGTGCAACAA |
| | | CCAGCAGAGCTTTCATCAGGGACGTTTTCACGGGCTG |
| | | GTATCGCCGGGTTCCCGGGAAGCAGCGCGAATTGGTC |
| | | GCTCGCATTTACAATGGCGGTAACACAAATTATGCAG |
| | | ACTTCGCGAAGGGCCGATTCACCATCTCCAGGGACAA |
| | | CGCCAAGAAGATGGTGTATCTGCAAATGAACAGCCTG |
| | | CGCCCTGAGGACACAGCGCTGTATTACTGCCTTTTTTC |
| | | GGGTACAATCAATACTGGCAGAGAGTATCGGTCTGGA |
| | | GACTACTGGGGCCAGGGGACCCTGGTCACCGTCTCCT |
| | | CA |
| 324 | Nucleotide sequence | GAGGTGCAATTGGTGGAGTCTGGGGGAGGAGTTGTG |
| | encoding F010301932 | CAGCCTGGAGGATCACTAAGACTGTCCTGTGCAACAA |
| | | CCTCCAGAGCTTTCATCAGGGACGTTTTCACGGGCTG |
| | | GTATCGCCGGGTTCCCGGGAAGGAGCGCGAATTGGTC |
| | | GCTCGCATTTACAATGGCGGTAACACAAATTATGCAG |
| | | ACTTCGCGAAGGGCCGATTCTCCATCTCCAGGGACAA |
| | | CGCCAAGAAGATGGTGACTCTGAGAATGAGCAATCT |
| | | GCGCCCTGAGGACACAGGGCTGTATTACTGCCTTTTT |
| | | TCGGGTACAATCAATACTGGCAGAGAGTATCGGTCTG |
| | | GAGACTACTGGGGCCAGGGGACCCTGGTCACCGTCTC |
| | | CTCA |
| 325 | Nucleotide sequence | GAGGTGCAATTGGTGGAGTCTGGGGGAGGAGTTGTG |
| | encoding F010301933 | CAGCCTGGAGGATCACTAAGACTGTCCTGTGCAACAA |
| | | CCTCCAGAGCTTTCATCAGGGACGTTTTCACGGGCTG |
| | | GTATCGCCGGGTTCCCGGGAAGGAGCGCGAATTGGTC |
| | | GCTCGCATTTACAATGGCGGTAACACAAATTATGCAG |
| | | ACTTCGCGAAGGGCCGATTCACCATCTCCAGGGACAA |
| | | CGCCAAGAAGATGGTGACTCTGAGAATGAGCAATCT |
| | | GCGCCCTGAGGACACAGGGCTGTATTACTGCCTTTTT |
| | | TCGGGTACAATCAATACTGGCAGAGAGTATCGGTCTG |
| | | GAGACTACTGGGGCCAGGGGACCCTGGTCACCGTCTC |
| | | CTCA |
| 326 | Nucleotide sequence | GAGGTGCAATTGGTGGAGTCTGGGGGAGGAGTTGTG |
| | encoding F010301934 | CAGCCTGGAGGATCACTAAGACTGTCCTGTGCAACAA |
| | | CCTCCAGAGCTTTCATCAGGGACGTTTTCACGGGCTG |
| | | GTATCGCCGGGTTCCCGGGAAGGAGCGCGAATTGGTC |
| | | GCTCGCATTTACAATGGCGGTAACACAAATTATGCAG |
| | | ACTTCGCGAAGGGCCGATTCTCCATCTCCAGGGACAA |
| | | CGCCAAGAAGACCGTGACTCTGAGAATGAGCAATCT |
| | | GCGCCCTGAGGACACAGGGCTGTATTACTGCCTTTTT |
| | | TCGGGTACAATCAATACTGGCAGAGAGTATCGGTCTG |
| | | GAGACTACTGGGGCCAGGGGACCCTGGTCACCGTCTC |
| | | CTCA |
| 327 | Nucleotide sequence | GAGGTGCAATTGGTGGAGTCTGGGGGAGGAGTTGTG |
| | encoding F010301935 | CAGCCTGGAGGATCACTAAGACTGTCCTGTGCAACAA |
| | | CCTCCAGAGCTTTCATCAGGGACGTTTTCACGGGCTG |
| | | GTATCGCCGGGTTCCCGGGAAGGAGCGCGAATTGGTC |
| | | GCTCGCATTTACAATGGCGGTAACACAAATTATGCAG |
| | | ACTTCGCGAAGGGCCGATTCTCCATCTCCAGGGACAA |
| | | CGCCAAGAAGATGGTGTATCTGAGAATGAGCAATCTG |
| | | CGCCCTGAGGACACAGGGCTGTATTACTGCCTTTTTTC |
| | | GGGTACAATCAATACTGGCAGAGAGTATCGGTCTGGA |
| | | GACTACTGGGGCCAGGGGACCCTGGTCACCGTCTCCT |
| | | CA |
| 328 | Nucleotide sequence | GAGGTGCAATTGGTGGAGTCTGGGGGAGGAGTTGTG |
| | encoding F010301936 | CAGCCTGGAGGATCACTAAGACTGTCCTGTGCAACAA |
| | | CCTCCAGAGCTTTCATCAGGGACGTTTTCACGGGCTG |
| | | GTATCGCCGGGTTCCCGGGAAGGAGCGCGAATTGGTC |
| | | GCTCGCATTTACAATGGCGGTAACACAAATTATGCAG |
| | | ACTTCGCGAAGGGCCGATTCTCCATCTCCAGGGACAA |
| | | CGCCAAGAAGATGGTGACTCTGCAAATGAGCAATCTG |
| | | CGCCCTGAGGACACAGGGCTGTATTACTGCCTTTTTTC |
| | | GGGTACAATCAATACTGGCAGAGAGTATCGGTCTGGA |
| | | GACTACTGGGGCCAGGGGACCCTGGTCACCGTCTCCT |
| | | CA |
| 329 | Nucleotide sequence | GAGGTGCAATTGGTGGAGTCTGGGGGAGGAGTTGTG |
| | encoding F010301937 | CAGCCTGGAGGATCACTAAGACTGTCCTGTGCAACAA |
| | | CCTCCAGAGCTTTCATCAGGGACGTTTTCACGGGCTG |
| | | GTATCGCCGGGTTCCCGGGAAGGAGCGCGAATTGGTC |
| | | GCTCGCATTTACAATGGCGGTAACACAAATTATGCAG |
| | | ACTTCGCGAAGGGCCGATTCTCCATCTCCAGGGACAA |
| | | CGCCAAGAAGATGGTGACTCTGAGAATGAACAATCT |
| | | GCGCCCTGAGGACACAGGGCTGTATTACTGCCTTTTT |
| | | TCGGGTACAATCAATACTGGCAGAGAGTATCGGTCTG |
| | | GAGACTACTGGGGCCAGGGGACCCTGGTCACCGTCTC |
| | | CTCA |
| 330 | Nucleotide sequence | GAGGTGCAATTGGTGGAGTCTGGGGGAGGAGTTGTG |
| | encoding F010301938 | CAGCCTGGAGGATCACTAAGACTGTCCTGTGCAACAA |
| | | CCTCCAGAGCTTTCATCAGGGACGTTTTCACGGGCTG |
| | | GTATCGCCGGGTTCCCGGGAAGGAGCGCGAATTGGTC |
| | | GCTCGCATTTACAATGGCGGTAACACAAATTATGCAG |
| | | ACTTCGCGAAGGGCCGATTCTCCATCTCCAGGGACAA |
| | | CGCCAAGAAGATGGTGACTCTGAGAATGAGCAGCCT |
| | | GCGCCCTGAGGACACAGGGCTGTATTACTGCCTTTTT |
| | | TCGGGTACAATCAATACTGGCAGAGAGTATCGGTCTG |
| | | GAGACTACTGGGGCCAGGGGACCCTGGTCACCGTCTC |
| | | CTCA |
| 331 | Nucleotide sequence | GAGGTGCAATTGGTGGAGTCTGGGGGAGGAGTTGTG |
| | encoding F010301939 | CAGCCTGGAGGATCACTAAGACTGTCCTGTGCAACAA |
| | | CCTCCAGAGCTTTCATCAGGGACGTTTTCACGGGCTG |
| | | GTATCGCCGGGTTCCCGGGAAGGAGCGCGAATTGGTC |
| | | GCTCGCATTTACAATGGCGGTAACACAAATTATGCAG |
| | | ACTTCGCGAAGGGCCGATTCTCCATCTCCAGGGACAA |
| | | CGCCAAGAAGATGGTGACTCTGAGAATGAGCAATCT |
| | | GCGCCCTGAGGACACAGCGCTGTATTACTGCCTTTTTT |
| | | CGGGTACAATCAATACTGGCAGAGAGTATCGGTCTGG |
| | | AGACTACTGGGGCCAGGGGACCCTGGTCACCGTCTCC |
| | | TCA |
| 332 | Nucleotide sequence | GAGGTGCAATTGGTGGAGTCTGGGGGAGGAGTGGTG |
| | encoding F010302333 | CAGCCTGGAGGATCACTAAGACTGTCCTGTGCAGCGA |
| | | GCAGCAGACAGTTCATCAGGGACGTTTTCACGGGCTG |
| | | GTATCGCCGGGCGCCCGGGAAGCAGCGCGAATTGGT |
| | | CGCTCGCATTTACAATGAAGGTAACACAAATTATGCA |
| | | GACAGCGCGAAGGGCCGATTCACCATCTCCAGGGAC |
| | | AACGCCAAGAAAACCGTGTATCTGCAAATGAACAGC |
| | | CTGCGCCCTGAGGACACAGCGCTGTATTACTGCCTTT |
| | | TTTCGGGTACAATCAGCACTGGCAGAGAGTATCGGTC |
| | | TGGAGACTACTGGGGCCAGGGGACCCTGGTCACCGTC |
| | | TCCTCA |
| 333 | Nucleotide sequence | GAGGTGCAATTGGTGGAGTCTGGGGGAGGAGTGGTG |
| | encoding F010302334 | CAGCCTGGAGGATCACTAAGACTGTCCTGTGCAGCGA |
| | | GCAGCAGACAGTTCATCAGGGACGTTTTCACGGGCTG |
| | | GTATCGCCGGGCGCCCGGGAAGCAGCGCGAATTGGT |
| | | CGCTCGCATTTACAATGAAGGTAACACACAGTATGCA |
| | | GACAGCGCGAAGGGCCGATTCACCATCTCCAGGGAC |
| | | AACGCCAAGAAAACCGTGTATCTGCAAATGAACAGC |
| | | CTGCGCCCTGAGGACACAGCGCTGTATTACTGCCTTT |
| | | TTTCGGGTACAATCAGCACTGGCAGAGAGTATCGGTC |
| | | TGGAGACTACTGGGGCCAGGGGACCCTGGTCACCGTC |
| | | TCCTCA |
| 334 | Nucleotide sequence | GAGGTGCAATTGGTGGAGTCTGGGGGAGGAGTGGTG |
| | encoding F010302335 | CAGCCTGGAGGATCACTAAGACTGTCCTGTGCAGCGA |
| | | GCAGCAGACAGTTCATCAGGGACGTTTTCACGGGCTG |
| | | GTATCGCCGGGCGCCCGGGAAGCAGCGCGAATTGGT |
| | | CGCTCGCATTTACGAAAGCGGTAACACACAGTATGCA |
| | | GACAGCGCGAAGGGCCGATTCACCATCTCCAGGGAC |
| | | AACGCCAAGAAAACCGTGTATCTGCAAATGAACAGC |
| | | CTGCGCCCTGAGGACACAGCGCTGTATTACTGCCTTT |
| | | TTTCGGGTACAATCAGCACTGGCAGAGAGTATCGGTC |
| | | TGGAGACTACTGGGGCCAGGGGACCCTGGTCACCGTC |
| | | TCCTCA |
| 335 | Nucleotide sequence | GAGGTGCAATTGGTGGAGTCTGGGGGAGGAGTGGTG |
| | encoding F010302336 | CAGCCTGGAGGATCACTAAGACTGTCCTGTGCAGCGA |
| | | GCCATAGACAGTTCATCAGGGACGTTTTCACGGGCTG |
| | | GTATCGCCGGGCGCCCGGGAAGCAGCGCGAATTGGT |
| | | CGCTCGCATTTACAATGAAGGTAACACACAGTATGCA |
| | | GACAGCGCGAAGGGCCGATTCACCATCTCCAGGGAC |
| | | AACGCCAAGAAAACCGTGTATCTGCAAATGAACAGC |
| | | CTGCGCCCTGAGGACACAGCGCTGTATTACTGCCTTT |
| | | TTTCGGGTACAATCAGCACTGGCAGAGAGTATCGGTC |
| | | TGGAGACTACTGGGGCCAGGGGACCCTGGTCACCGTC |
| | | TCCTCA |
| 336 | Nucleotide sequence | GAGGTGCAATTGGTGGAGTCTGGGGGAGGAGTGGTG |
| | encoding F010302337 | CAGCCTGGAGGATCACTAAGACTGTCCTGTGCAGCGA |
| | | GCCATAGACAGTTCATCAGGGACGTTTTCACGGGCTG |
| | | GTATCGCCGGGCGCCCGGGAAGCAGCGCGAATTGGT |
| | | CGCTCGCATTTACGAAGGCGGTAACACACAGTATGCA |
| | | GACAGCGCGAAGGGCCGATTCACCATCTCCAGGGAC |
| | | AACGCCAAGAAAACCGTGTATCTGCAAATGAACAGC |
| | | CTGCGCCCTGAGGACACAGCGCTGTATTACTGCCTTT |
| | | TTTCGGGTACAATCAGCACTGGCAGAGAGTATCGGTC |
| | | TGGAGACTACTGGGGCCAGGGGACCCTGGTCACCGTC |
| | | TCCTCA |
| 337 | Nucleotide sequence | GAGGTGCAATTGGTGGAGTCTGGGGGAGGAGTGGTG |
| | encoding F010302338 | CAGCCTGGAGGATCACTAAGACTGTCCTGTGCAGCGA |
| | | GCCATAGAGCTTTCATCAGGGACGTTTTCACGGGCTG |
| | | GTATCGCCGGGCGCCCGGGAAGCAGCGCGAATTGGT |
| | | CGCTCGCATTTACGAAAGCGGTAACACACAGTATGCA |
| | | GACAGCGCGAAGGGCCGATTCACCATCTCCAGGGAC |
| | | AACGCCAAGAAAACCGTGTATCTGCAAATGAACAGC |
| | | CTGCGCCCTGAGGACACAGCGCTGTATTACTGCCTTT |
| | | TTTCGGGTACAATCAGCACTGGCAGAGAGTATCGGTC |
| | | TGGAGACTACTGGGGCCAGGGGACCCTGGTCACCGTC |
| | | TCCTCA |
| 338 | Nucleotide sequence | GAGGTGCAATTGGTGGAGTCTGGGGGAGGAGTGGTG |
| | encoding F010302339 | CAGCCTGGAGGATCACTAAGACTGTCCTGTGCAGCGA |
| | | GCCATAGAGCTTTCATCAGGGACGTTTTCACGGGCTG |
| | | GTATCGCCGGGCGCCCGGGAAGCAGCGCGAATTGGT |
| | | CGCTCGCATTTACGAAGGCGGTAACACACAGTATGCA |
| | | GACAGCGCGAAGGGCCGATTCACCATCTCCAGGGAC |
| | | AACGCCAAGAAAACCGTGTATCTGCAAATGAACAGC |
| | | CTGCGCCCTGAGGACACAGCGCTGTATTACTGCCTTT |
| | | TTTCGGGTACAATCAGCACTGGCAGAGAGTATCGGTC |
| | | TGGAGACTACTGGGGCCAGGGGACCCTGGTCACCGTC |
| | | TCCTCA |
| 339 | Nucleotide sequence | GAGGTGCAATTGGTGGAGTCTGGGGGAGGAGTGGTG |
| | encoding F010302340 | CAGCCTGGAGGATCACTAAGACTGTCCTGTGCAGCGA |
| | | GCCATAGAGCTTTCATCAGGGACCTGTTCACGGGCTG |
| | | GTATCGCCGGGCGCCCGGGAAGCAGCGCGAATTGGT |
| | | CGCTCGCATTTACGAAAGCGGTAACACAAATTATGCA |
| | | GACAGCGCGAAGGGCCGATTCACCATCTCCAGGGAC |
| | | AACGCCAAGAAAACCGTGTATCTGCAAATGAACAGC |
| | | CTGCGCCCTGAGGACACAGCGCTGTATTACTGCCTTT |
| | | TTTCGGGTACAATCAGCACTGGCAGAGAGTATCGGTC |
| | | TGGAGACTACTGGGGCCAGGGGACCCTGGTCACCGTC |
| | | TCCTCA |
| 340 | Nucleotide sequence | GAGGTGCAATTGGTGGAGTCTGGGGGAGGAGTGGTG |
| | encoding F010302341 | CAGCCTGGAGGATCACTAAGACTGTCCTGTGCAGCGA |
| | | GCAGCAGACAGTTCATCAGGGACGTTTTCACGGGCTG |
| | | GTATCGCCAGGCGCCCGGGAAGCAGCGCGAATTGGT |
| | | CGCTCGCATTTACAATGAAGGTAACACAAATTATGCA |
| | | GACAGCGCGAAGGGCCGATTCACCATCTCCAGGGAC |
| | | AACGCCAAGAAAACCGTGTATCTGCAAATGAACAGC |
| | | CTGCGCCCTGAGGACACAGCGCTGTATTACTGCCTTT |
| | | TTTCGGGTACAATCAGCACTGGCAGAGAGTATCGGTC |
| | | TGGAGACTACTGGGGCCAGGGGACCCTGGTCACCGTC |
| | | TCCTCA |
| 341 | Nucleotide sequence | GAGGTGCAATTGGTGGAGTCTGGGGGAGGAGTGGTG |
| | encoding F010302342 | CAGCCTGGAGGATCACTAAGACTGTCCTGTGCAGCGA |
| | | GCAGCAGACAGTTCATCAGGGACGTTTTCACGGGCTG |
| | | GTATCGCCAGGCGCCCGGGAAGCAGCGCGAATTGGT |
| | | CGCTCGCATTTACAATGAAGGTAACACACAGTATGCA |
| | | GACAGCGCGAAGGGCCGATTCACCATCTCCAGGGAC |
| | | AACGCCAAGAAAACCGTGTATCTGCAAATGAACAGC |
| | | CTGCGCCCTGAGGACACAGCGCTGTATTACTGCCTTT |
| | | TTTCGGGTACAATCAGCACTGGCAGAGAGTATCGGTC |
| | | TGGAGACTACTGGGGCCAGGGGACCCTGGTCACCGTC |
| | | TCCTCA |
| 342 | Nucleotide sequence | GAGGTGCAATTGGTGGAGTCTGGGGGAGGAGTGGTG |
| | encoding F010302343 | CAGCCTGGAGGATCACTAAGACTGTCCTGTGCAGCGA |
| | | GCAGCAGACAGTTCATCAGGGACGTTTTCACGGGCTG |
| | | GTATCGCCAGGCGCCCGGGAAGCAGCGCGAATTGGT |
| | | CGCTCGCATTTACGAAAGCGGTAACACACAGTATGCA |
| | | GACAGCGCGAAGGGCCGATTCACCATCTCCAGGGAC |
| | | AACGCCAAGAAAACCGTGTATCTGCAAATGAACAGC |
| | | CTGCGCCCTGAGGACACAGCGCTGTATTACTGCCTTT |
| | | TTTCGGGTACAATCAGCACTGGCAGAGAGTATCGGTC |
| | | TGGAGACTACTGGGGCCAGGGGACCCTGGTCACCGTC |
| | | TCCTCA |
| 343 | Nucleotide sequence | GAGGTGCAATTGGTGGAGTCTGGGGGAGGAGTGGTG |
| | encoding F010302344 | CAGCCTGGAGGATCACTAAGACTGTCCTGTGCAGCGA |
| | | GCCATAGACAGTTCATCAGGGACGTTTTCACGGGCTG |
| | | GTATCGCCAGGCGCCCGGGAAGCAGCGCGAATTGGT |
| | | CGCTCGCATTTACAATGAAGGTAACACACAGTATGCA |
| | | GACAGCGCGAAGGGCCGATTCACCATCTCCAGGGAC |
| | | AACGCCAAGAAAACCGTGTATCTGCAAATGAACAGC |
| | | CTGCGCCCTGAGGACACAGCGCTGTATTACTGCCTTT |
| | | TTTCGGGTACAATCAGCACTGGCAGAGAGTATCGGTC |
| | | TGGAGACTACTGGGGCCAGGGGACCCTGGTCACCGTC |
| | | TCCTCA |
| 344 | Nucleotide sequence | GAGGTGCAATTGGTGGAGTCTGGGGGAGGAGTGGTG |
| | encoding F010302345 | CAGCCTGGAGGATCACTAAGACTGTCCTGTGCAGCGA |
| | | GCCATAGACAGTTCATCAGGGACGTTTTCACGGGCTG |
| | | GTATCGCCAGGCGCCCGGGAAGCAGCGCGAATTGGT |
| | | CGCTCGCATTTACGAAGGCGGTAACACACAGTATGCA |
| | | GACAGCGCGAAGGGCCGATTCACCATCTCCAGGGAC |
| | | AACGCCAAGAAAACCGTGTATCTGCAAATGAACAGC |
| | | CTGCGCCCTGAGGACACAGCGCTGTATTACTGCCTTT |
| | | TTTCGGGTACAATCAGCACTGGCAGAGAGTATCGGTC |
| | | TGGAGACTACTGGGGCCAGGGGACCCTGGTCACCGTC |
| | | TCCTCA |
| 345 | Nucleotide sequence | GAGGTGCAATTGGTGGAGTCTGGGGGAGGAGTGGTG |
| | encoding F010302346 | CAGCCTGGAGGATCACTAAGACTGTCCTGTGCAGCGA |
| | | GCCATAGAGCTTTCATCAGGGACGTTTTCACGGGCTG |
| | | GTATCGCCAGGCGCCCGGGAAGCAGCGCGAATTGGT |
| | | CGCTCGCATTTACGAAAGCGGTAACACACAGTATGCA |
| | | GACAGCGCGAAGGGCCGATTCACCATCTCCAGGGAC |
| | | AACGCCAAGAAAACCGTGTATCTGCAAATGAACAGC |
| | | CTGCGCCCTGAGGACACAGCGCTGTATTACTGCCTTT |
| | | TTTCGGGTACAATCAGCACTGGCAGAGAGTATCGGTC |
| | | TGGAGACTACTGGGGCCAGGGGACCCTGGTCACCGTC |
| | | TCCTCA |
| 346 | Nucleotide sequence | GAGGTGCAATTGGTGGAGTCTGGGGGAGGAGTGGTG |
| | encoding F010302347 | CAGCCTGGAGGATCACTAAGACTGTCCTGTGCAGCGA |
| | | GCCATAGAGCTTTCATCAGGGACGTTTTCACGGGCTG |
| | | GTATCGCCAGGCGCCCGGGAAGCAGCGCGAATTGGT |
| | | CGCTCGCATTTACGAAGGCGGTAACACACAGTATGCA |
| | | GACAGCGCGAAGGGCCGATTCACCATCTCCAGGGAC |
| | | AACGCCAAGAAAACCGTGTATCTGCAAATGAACAGC |
| | | CTGCGCCCTGAGGACACAGCGCTGTATTACTGCCTTT |
| | | TTTCGGGTACAATCAGCACTGGCAGAGAGTATCGGTC |
| | | TGGAGACTACTGGGGCCAGGGGACCCTGGTCACCGTC |
| | | TCCTCA |
| 347 | Nucleotide sequence | GAGGTGCAATTGGTGGAGTCTGGGGGAGGAGTGGTG |
| | encoding F010302348 | CAGCCTGGAGGATCACTAAGACTGTCCTGTGCAGCGA |
| | | GCCATAGAGCTTTCATCAGGGACCTGTTCACGGGCTG |
| | | GTATCGCCAGGCGCCCGGGAAGCAGCGCGAATTGGT |
| | | CGCTCGCATTTACGAAAGCGGTAACACAAATTATGCA |
| | | GACAGCGCGAAGGGCCGATTCACCATCTCCAGGGAC |
| | | AACGCCAAGAAAACCGTGTATCTGCAAATGAACAGC |
| | | CTGCGCCCTGAGGACACAGCGCTGTATTACTGCCTTT |
| | | TTTCGGGTACAATCAGCACTGGCAGAGAGTATCGGTC |
| | | TGGAGACTACTGGGGCCAGGGGACCCTGGTCACCGTC |
| | | TCCTCA |
| 348 | Nucleotide sequence | GAGGTGCAATTGGTGGAGTCTGGGGGAGGAGTGGTG |
| | encoding F010302349 | CAGCCTGGAGGATCACTAAGACTGTCCTGTGCAGCGA |
| | | GCAGCAGACAGTTCATCAGGGACGTTTTCACGGGCTG |
| | | GTATCGCCGGGCGCCCGGGAAGCAGCGCGAATTGGT |
| | | CGCTCGCATTTACAATGAAGGTAACACAAATTATGCA |
| | | GACAGCGTGAAGGGCCGATTCACCATCTCCAGGGAC |
| | | AACGCCAAGAAAACCGTGTATCTGCAAATGAACAGC |
| | | CTGCGCCCTGAGGACACAGCGCTGTATTACTGCCTTT |
| | | TTTCGGGTACAATCAGCACTGGCAGAGAGTATCGGTC |
| | | TGGAGACTACTGGGGCCAGGGGACCCTGGTCACCGTC |
| | | TCCTCA |
| 349 | Nucleotide sequence | GAGGTGCAATTGGTGGAGTCTGGGGGAGGAGTGGTG |
| | encoding F010302350 | CAGCCTGGAGGATCACTAAGACTGTCCTGTGCAGCGA |
| | | GCAGCAGACAGTTCATCAGGGACGTTTTCACGGGCTG |
| | | GTATCGCCGGGCGCCCGGGAAGCAGCGCGAATTGGT |
| | | CGCTCGCATTTACAATGAAGGTAACACACAGTATGCA |
| | | GACAGCGTGAAGGGCCGATTCACCATCTCCAGGGAC |
| | | AACGCCAAGAAAACCGTGTATCTGCAAATGAACAGC |
| | | CTGCGCCCTGAGGACACAGCGCTGTATTACTGCCTTT |
| | | TTTCGGGTACAATCAGCACTGGCAGAGAGTATCGGTC |
| | | TGGAGACTACTGGGGCCAGGGGACCCTGGTCACCGTC |
| | | TCCTCA |
| 350 | Nucleotide sequence | GAGGTGCAATTGGTGGAGTCTGGGGGAGGAGTGGTG |
| | encoding F010302351 | CAGCCTGGAGGATCACTAAGACTGTCCTGTGCAGCGA |
| | | GCAGCAGACAGTTCATCAGGGACGTTTTCACGGGCTG |
| | | GTATCGCCGGGCGCCCGGGAAGCAGCGCGAATTGGT |
| | | CGCTCGCATTTACGAAAGCGGTAACACACAGTATGCA |
| | | GACAGCGTGAAGGGCCGATTCACCATCTCCAGGGAC |
| | | AACGCCAAGAAAACCGTGTATCTGCAAATGAACAGC |
| | | CTGCGCCCTGAGGACACAGCGCTGTATTACTGCCTTT |
| | | TTTCGGGTACAATCAGCACTGGCAGAGAGTATCGGTC |
| | | TGGAGACTACTGGGGCCAGGGGACCCTGGTCACCGTC |
| | | TCCTCA |
| 351 | Nucleotide sequence | GAGGTGCAATTGGTGGAGTCTGGGGGAGGAGTGGTG |
| | encoding F010302352 | CAGCCTGGAGGATCACTAAGACTGTCCTGTGCAGCGA |
| | | GCCATAGACAGTTCATCAGGGACGTTTTCACGGGCTG |
| | | GTATCGCCGGGCGCCCGGGAAGCAGCGCGAATTGGT |
| | | CGCTCGCATTTACAATGAAGGTAACACACAGTATGCA |
| | | GACAGCGTGAAGGGCCGATTCACCATCTCCAGGGAC |
| | | AACGCCAAGAAAACCGTGTATCTGCAAATGAACAGC |
| | | CTGCGCCCTGAGGACACAGCGCTGTATTACTGCCTTT |
| | | TTTCGGGTACAATCAGCACTGGCAGAGAGTATCGGTC |
| | | TGGAGACTACTGGGGCCAGGGGACCCTGGTCACCGTC |
| | | TCCTCA |
| 352 | Nucleotide sequence | GAGGTGCAATTGGTGGAGTCTGGGGGAGGAGTGGTG |
| | encoding F010302353 | CAGCCTGGAGGATCACTAAGACTGTCCTGTGCAGCGA |
| | | GCCATAGACAGTTCATCAGGGACGTTTTCACGGGCTG |
| | | GTATCGCCGGGCGCCCGGGAAGCAGCGCGAATTGGT |
| | | CGCTCGCATTTACGAAGGCGGTAACACACAGTATGCA |
| | | GACAGCGTGAAGGGCCGATTCACCATCTCCAGGGAC |
| | | AACGCCAAGAAAACCGTGTATCTGCAAATGAACAGC |
| | | CTGCGCCCTGAGGACACAGCGCTGTATTACTGCCTTT |
| | | TTTCGGGTACAATCAGCACTGGCAGAGAGTATCGGTC |
| | | TGGAGACTACTGGGGCCAGGGGACCCTGGTCACCGTC |
| | | TCCTCA |
| 353 | Nucleotide sequence | GAGGTGCAATTGGTGGAGTCTGGGGGAGGAGTGGTG |
| | encoding F010302354 | CAGCCTGGAGGATCACTAAGACTGTCCTGTGCAGCGA |
| | | GCCATAGAGCTTTCATCAGGGACGTTTTCACGGGCTG |
| | | GTATCGCCGGGCGCCCGGGAAGCAGCGCGAATTGGT |
| | | CGCTCGCATTTACGAAAGCGGTAACACACAGTATGCA |
| | | GACAGCGTGAAGGGCCGATTCACCATCTCCAGGGAC |
| | | AACGCCAAGAAAACCGTGTATCTGCAAATGAACAGC |
| | | CTGCGCCCTGAGGACACAGCGCTGTATTACTGCCTTT |
| | | TTTCGGGTACAATCAGCACTGGCAGAGAGTATCGGTC |
| | | TGGAGACTACTGGGGCCAGGGGACCCTGGTCACCGTC |
| | | TCCTCA |
| 354 | Nucleotide sequence | GAGGTGCAATTGGTGGAGTCTGGGGGAGGAGTGGTG |
| | encoding F010302355 | CAGCCTGGAGGATCACTAAGACTGTCCTGTGCAGCGA |
| | | GCCATAGAGCTTTCATCAGGGACGTTTTCACGGGCTG |
| | | GTATCGCCGGGCGCCCGGGAAGCAGCGCGAATTGGT |
| | | CGCTCGCATTTACGAAGGCGGTAACACACAGTATGCA |
| | | GACAGCGTGAAGGGCCGATTCACCATCTCCAGGGAC |
| | | AACGCCAAGAAAACCGTGTATCTGCAAATGAACAGC |
| | | CTGCGCCCTGAGGACACAGCGCTGTATTACTGCCTTT |
| | | TTTCGGGTACAATCAGCACTGGCAGAGAGTATCGGTC |
| | | TGGAGACTACTGGGGCCAGGGGACCCTGGTCACCGTC |
| | | TCCTCA |
| 355 | Nucleotide sequence | GAGGTGCAATTGGTGGAGTCTGGGGGAGGAGTGGTG |
| | encoding F010302356 | CAGCCTGGAGGATCACTAAGACTGTCCTGTGCAGCGA |
| | | GCCATAGAGCTTTCATCAGGGACCTGTTCACGGGCTG |
| | | GTATCGCCGGGCGCCCGGGAAGCAGCGCGAATTGGT |
| | | CGCTCGCATTTACGAAAGCGGTAACACAAATTATGCA |
| | | GACAGCGTGAAGGGCCGATTCACCATCTCCAGGGAC |
| | | AACGCCAAGAAAACCGTGTATCTGCAAATGAACAGC |
| | | CTGCGCCCTGAGGACACAGCGCTGTATTACTGCCTTT |
| | | TTTCGGGTACAATCAGCACTGGCAGAGAGTATCGGTC |
| | | TGGAGACTACTGGGGCCAGGGGACCCTGGTCACCGTC |
| | | TCCTCA |
| 356 | Nucleotide sequence | GAGGTGCAATTGGTGGAGTCTGGGGGAGGAGTGGTG |
| | encoding F010302357 | CAGCCTGGAGGATCACTAAGACTGTCCTGTGCAGCGA |
| | | GCAGCAGACAGTTCATCAGGGACGTTTTCACGGGCTG |
| | | GTATCGCCAGGCGCCCGGGAAGCAGCGCGAATTGGT |
| | | CGCTCGCATTTACAATGAAGGTAACACAAATTATGCA |
| | | GACAGCGTGAAGGGCCGATTCACCATCTCCAGGGAC |
| | | AACGCCAAGAAAACCGTGTATCTGCAAATGAACAGC |
| | | CTGCGCCCTGAGGACACAGCGCTGTATTACTGCCTTT |
| | | TTTCGGGTACAATCAGCACTGGCAGAGAGTATCGGTC |
| | | TGGAGACTACTGGGGCCAGGGGACCCTGGTCACCGTC |
| | | TCCTCA |
| 357 | Nucleotide sequence | GAGGTGCAATTGGTGGAGTCTGGGGGAGGAGTGGTG |
| | encoding F010302358 | CAGCCTGGAGGATCACTAAGACTGTCCTGTGCAGCGA |
| | | GCAGCAGACAGTTCATCAGGGACGTTTTCACGGGCTG |
| | | GTATCGCCAGGCGCCCGGGAAGCAGCGCGAATTGGT |
| | | CGCTCGCATTTACAATGAAGGTAACACACAGTATGCA |
| | | GACAGCGTGAAGGGCCGATTCACCATCTCCAGGGAC |
| | | AACGCCAAGAAAACCGTGTATCTGCAAATGAACAGC |
| | | CTGCGCCCTGAGGACACAGCGCTGTATTACTGCCTTT |
| | | TTTCGGGTACAATCAGCACTGGCAGAGAGTATCGGTC |
| | | TGGAGACTACTGGGGCCAGGGGACCCTGGTCACCGTC |
| | | TCCTCA |
| 358 | Nucleotide sequence | GAGGTGCAATTGGTGGAGTCTGGGGGAGGAGTGGTG |
| | encoding F010302359 | CAGCCTGGAGGATCACTAAGACTGTCCTGTGCAGCGA |
| | | GCAGCAGACAGTTCATCAGGGACGTTTTCACGGGCTG |
| | | GTATCGCCAGGCGCCCGGGAAGCAGCGCGAATTGGT |
| | | CGCTCGCATTTACGAAAGCGGTAACACACAGTATGCA |
| | | GACAGCGTGAAGGGCCGATTCACCATCTCCAGGGAC |
| | | AACGCCAAGAAAACCGTGTATCTGCAAATGAACAGC |
| | | CTGCGCCCTGAGGACACAGCGCTGTATTACTGCCTTT |
| | | TTTCGGGTACAATCAGCACTGGCAGAGAGTATCGGTC |
| | | TGGAGACTACTGGGGCCAGGGGACCCTGGTCACCGTC |
| | | TCCTCA |
| 359 | Nucleotide sequence | GAGGTGCAATTGGTGGAGTCTGGGGGAGGAGTGGTG |
| | encoding F010302360 | CAGCCTGGAGGATCACTAAGACTGTCCTGTGCAGCGA |
| | | GCCATAGACAGTTCATCAGGGACGTTTTCACGGGCTG |
| | | GTATCGCCAGGCGCCCGGGAAGCAGCGCGAATTGGT |
| | | CGCTCGCATTTACAATGAAGGTAACACACAGTATGCA |
| | | GACAGCGTGAAGGGCCGATTCACCATCTCCAGGGAC |
| | | AACGCCAAGAAAACCGTGTATCTGCAAATGAACAGC |
| | | CTGCGCCCTGAGGACACAGCGCTGTATTACTGCCTTT |
| | | TTTCGGGTACAATCAGCACTGGCAGAGAGTATCGGTC |
| | | TGGAGACTACTGGGGCCAGGGGACCCTGGTCACCGTC |
| | | TCCTCA |
| 360 | Nucleotide sequence | GAGGTGCAATTGGTGGAGTCTGGGGGAGGAGTGGTG |
| | encoding F010302361 | CAGCCTGGAGGATCACTAAGACTGTCCTGTGCAGCGA |
| | | GCCATAGACAGTTCATCAGGGACGTTTTCACGGGCTG |
| | | GTATCGCCAGGCGCCCGGGAAGCAGCGCGAATTGGT |
| | | CGCTCGCATTTACGAAGGCGGTAACACACAGTATGCA |
| | | GACAGCGTGAAGGGCCGATTCACCATCTCCAGGGAC |
| | | AACGCCAAGAAAACCGTGTATCTGCAAATGAACAGC |
| | | CTGCGCCCTGAGGACACAGCGCTGTATTACTGCCTTT |
| | | TTTCGGGTACAATCAGCACTGGCAGAGAGTATCGGTC |
| | | TGGAGACTACTGGGGCCAGGGGACCCTGGTCACCGTC |
| | | TCCTCA |
| 361 | Nucleotide sequence | GAGGTGCAATTGGTGGAGTCTGGGGGAGGAGTGGTG |
| | encoding F010302362 | CAGCCTGGAGGATCACTAAGACTGTCCTGTGCAGCGA |
| | | GCCATAGAGCTTTCATCAGGGACGTTTTCACGGGCTG |
| | | GTATCGCCAGGCGCCCGGGAAGCAGCGCGAATTGGT |
| | | CGCTCGCATTTACGAAAGCGGTAACACACAGTATGCA |
| | | GACAGCGTGAAGGGCCGATTCACCATCTCCAGGGAC |
| | | AACGCCAAGAAAACCGTGTATCTGCAAATGAACAGC |
| | | CTGCGCCCTGAGGACACAGCGCTGTATTACTGCCTTT |
| | | TTTCGGGTACAATCAGCACTGGCAGAGAGTATCGGTC |
| | | TGGAGACTACTGGGGCCAGGGGACCCTGGTCACCGTC |
| | | TCCTCA |
| 362 | Nucleotide sequence | GAGGTGCAATTGGTGGAGTCTGGGGGAGGAGTGGTG |
| | encoding F010302363 | CAGCCTGGAGGATCACTAAGACTGTCCTGTGCAGCGA |
| | | GCCATAGAGCTTTCATCAGGGACGTTTTCACGGGCTG |
| | | GTATCGCCAGGCGCCCGGGAAGCAGCGCGAATTGGT |
| | | CGCTCGCATTTACGAAGGCGGTAACACACAGTATGCA |
| | | GACAGCGTGAAGGGCCGATTCACCATCTCCAGGGAC |
| | | AACGCCAAGAAAACCGTGTATCTGCAAATGAACAGC |
| | | CTGCGCCCTGAGGACACAGCGCTGTATTACTGCCTTT |
| | | TTTCGGGTACAATCAGCACTGGCAGAGAGTATCGGTC |
| | | TGGAGACTACTGGGGCCAGGGGACCCTGGTCACCGTC |
| | | TCCTCA |
| 363 | Nucleotide sequence | GAGGTGCAATTGGTGGAGTCTGGGGGAGGAGTGGTG |
| | encoding F010302364 | CAGCCTGGAGGATCACTAAGACTGTCCTGTGCAGCGA |
| | | GCCATAGAGCTTTCATCAGGGACCTGTTCACGGGCTG |
| | | GTATCGCCAGGCGCCCGGGAAGCAGCGCGAATTGGT |
| | | CGCTCGCATTTACGAAAGCGGTAACACAAATTATGCA |
| | | GACAGCGTGAAGGGCCGATTCACCATCTCCAGGGAC |
| | | AACGCCAAGAAAACCGTGTATCTGCAAATGAACAGC |
| | | CTGCGCCCTGAGGACACAGCGCTGTATTACTGCCTTT |
| | | TTTCGGGTACAATCAGCACTGGCAGAGAGTATCGGTC |
| | | TGGAGACTACTGGGGCCAGGGGACCCTGGTCACCGTC |
| | | TCCTCA |
| 364 | Nucleotide sequence | GAGGTGCAATTGGTGGAGTCTGGGGGAGGAGTGGTG |
| | encoding F010302365 | CAGCCTGGAGGATCACTAAGACTGTCCTGTGCAGCGA |
| | | GCAGCAGAGCTTTCATCAGGGACGTTTTCACGGGCTG |
| | | GTATCGCCGGGCGCCCGGGAAGCAGCGCGAATTGGT |
| | | CGCTCGCATTTACAATGGCGGTAACACAAATTATGCA |
| | | GACAGCGCGAAGGGCCGATTCACCATCTCCAGGGAC |
| | | AACGCCAAGAAAACCGTGTATCTGCAAATGAACAGC |
| | | CTGCGCCCTGAGGACACAGCGCTGTATTACTGCCTTT |
| | | TTTCGGGTACAATCAGCACTGGCAGAGAGTATCGGTC |
| | | TGGAGACTACTGGGGCCAGGGGACCCTGGTCACCGTC |
| | | TCCTCA |
| 365 | Nucleotide sequence | GAGGTGCAATTGGTGGAGTCTGGGGGAGGAGTGGTG |
| | encoding F010302366 | CAGCCTGGAGGATCACTAAGACTGTCCTGTGCAGCGA |
| | | GCAGCAGAGCTTTCATCAGGGACGTTTTCACGGGCTG |
| | | GTATCGCCAGGCGCCCGGGAAGCAGCGCGAATTGGT |
| | | CGCTCGCATTTACAATGGCGGTAACACAAATTATGCA |
| | | GACAGCGCGAAGGGCCGATTCACCATCTCCAGGGAC |
| | | AACGCCAAGAAAACCGTGTATCTGCAAATGAACAGC |
| | | CTGCGCCCTGAGGACACAGCGCTGTATTACTGCCTTT |
| | | TTTCGGGTACAATCAGCACTGGCAGAGAGTATCGGTC |
| | | TGGAGACTACTGGGGCCAGGGGACCCTGGTCACCGTC |
| | | TCCTCA |
| 366 | Nucleotide sequence | GAGGTGCAATTGGTGGAGTCTGGGGGAGGAGTGGTG |
| | encoding F010302367 | CAGCCTGGAGGATCACTAAGACTGTCCTGTGCAGCGA |
| | | GCAGCAGAGCTTTCATCAGGGACGTTTTCACGGGCTG |
| | | GTATCGCCAGGCGCCCGGGAAGCAGCGCGAATTGGT |
| | | CGCTCGCATTTACAATGGCGGTAACACAAATTATGCA |
| | | GACAGCGTGAAGGGCCGATTCACCATCTCCAGGGAC |
| | | AACGCCAAGAAAACCGTGTATCTGCAAATGAACAGC |
| | | CTGCGCCCTGAGGACACAGCGCTGTATTACTGCCTTT |
| | | TTTCGGGTACAATCAGCACTGGCAGAGAGTATCGGTC |
| | | TGGAGACTACTGGGGCCAGGGGACCCTGGTCACCGTC |
| | | TCCTCA |
| 367 | Nucleotide sequence | GAGGTGCAATTGGTGGAGTCTGGGGGAGGAGTGGTG |
| | encoding F010302368 | CAGCCTGGAGGATCACTAAGACTGTCCTGTGCAGCGA |
| | | GCAGCAGACAGTTCATCAGGGACGTTTTCACGGGCTG |
| | | GTATCGCCGGGCGCCCGGGAAGCAGCGCGAATTGGT |
| | | CGCTCGCATTTACAATGAAGGTAACACAAATTATGCA |
| | | GACAGCGCGAAGGGCCGATTCACCATCTCCAGGGAC |
| | | AACGCCAAGAAAACCGTGTATCTGCAAATGAACAGC |
| | | CTGCGCCCTGAGGACACAGCGCTGTATTACTGCCTTT |
| | | TTTCGGGTACAATCAGCACTGGCAGAGAGTATCGGTC |
| | | TGGAGACTACTGGGGCCAGGGGACCCTGGTCACCGTC |
| | | TCCTCA |
| 368 | Nucleotide sequence | GAGGTGCAATTGGTGGAGTCTGGGGGAGGCTTGGCG |
| | encoding F010301656 | CAGCCTGGGGGGTCTCTGAGACTCTCCTGTGCAGCCT |
| | | CTGGACCCGTCTTTAATATCAACCGCATGGCCTGGTA |
| | | TCGCCGGGCTCCAGGGAAGCAGCGCGAATTGGTCGC |
| | | ATATGTCACCCCTACTGGTGATATAAGTTATACTGAC |
| | | TCCGTGAAGGGCCGATTCACCATTTCTAGGGACGGCT |
| | | CCAAGCGGTGGTCTCTACAAATGAACAGCCTGACACC |
| | | TGAGGACACGGCCGTCTATTACTGTCGCGCTTTACTA |
| | | CAACCGGATAGTTATTCTAATACGCGCACATATTGGG |
| | | GCCAGGGGACCCTGGTCACCGTCTCCTCA |
| 369 | Nucleotide sequence | GAGGTGCAATTGGTGGAGTCTGGGGGAGGCGTGGTTC |
| | encoding F010301840 | AGCCTGGGGGGTCTCTGAGACTCTCCTGTGCAGCCTC |
| | | TGGACCCGTGTTCAATATCAACCGCATGGCCTGGTAT |
| | | CGCCAGGCTCCAGGGAAGCAGCGCGAATTGGTCGCA |
| | | TATGTCACCCCTACTGGTGATATAAGTTATACTGACTC |
| | | CGTGAAGGGCCGATTCACCATTTCTCGCGACGGCTCC |
| | | AAGCGGACCTGGTCTCTACAAATGAACAGCCTGCGCC |
| | | CTGAGGACACGGCCCTGTATTACTGTCGCGCTTTACT |
| | | ACAACCGGATAGTTATTCTAATACGCGCACATATTGG |
| | | GGCCAGGGGACCCTGGTCACCGTCTCCTCA |
| 370 | Nucleotide sequence | GAGGTGCAATTGGTGGAGTCTGGGGGAGGCGTGGTTC |
| | encoding F010301841 | AGCCTGGGGGGTCTCTGAGACTCTCCTGTGCAGCCTC |
| | | TGGACCCGTGTTCAATATCAACCGCATGGCCTGGTAT |
| | | CGCCAGGCTCCAGGGAAGCAGCGCGAATTGGTCGCA |
| | | TATGTCACCCCTACTGGTGATATAAGTTATACTGACTC |
| | | CGTGAAGGGCCGATTCACCATTTCTCGCGACGGCTCC |
| | | AAGCGGTGGTCTCTACAAATGAACAGCCTGCGCCCTG |
| | | AGGACACGGCCCTGTATTACTGTCGCGCTTTACTACA |
| | | ACCGGATAGTTATTCTAATACGCGCACATATTGGGGC |
| | | CAGGGGACCCTGGTCACCGTCTCCTCA |
| 371 | Nucleotide sequence | GAGGTGCAATTGGTGGAGTCTGGGGGAGGCGTGGTTC |
| | encoding F010301842 | AGCCTGGGGGGTCTCTGAGACTCTCCTGTGCAGCCTC |
| | | TGGACCCGTGTTCAATATCAACCGCATGGCCTGGTAT |
| | | CGCCAGGCTCCAGGGAAGCAGCGCGAATTGGTCGCA |
| | | TATGTCACCCCTACTGGTGATATAAGTTATGCGGACT |
| | | CCGTGAAGGGCCGATTCACCATTTCTCGCGACGGCTC |
| | | CAAGCGGTGGTCTCTACAAATGAACAGCCTGCGCCCT |
| | | GAGGACACGGCCCTGTATTACTGTCGCGCTTTACTAC |
| | | AACCGGATAGTTATTCTAATACGCGCACATATTGGGG |
| | | CCAGGGGACCCTGGTCACCGTCTCCTCA |
| 372 | Nucleotide sequence | GAGGTGCAATTGGTGGAGTCTGGGGGAGGCGTGGTTC |
| | encoding F010301843 | AGCCTGGGGGGTCTCTGAGACTCTCCTGTGCAGCCTC |
| | | TGGACCCGTGTTCAATATCAACCGCATGGCCTGGTAT |
| | | CGCCAGGCTCCAGGGAAGCAGCGCGAATTGGTCGCA |
| | | TATGTCACCCCTACTGGTGATATAAGTTATACTGACTC |
| | | CGTGAAGGGCCGATTCACCATTTCTCGCGACAACTCC |
| | | AAGCGGTGGTCTCTACAAATGAACAGCCTGCGCCCTG |
| | | AGGACACGGCCCTGTATTACTGTCGCGCTTTACTACA |
| | | ACCGGATAGTTATTCTAATACGCGCACATATTGGGGC |
| | | CAGGGGACCCTGGTCACCGTCTCCTCA |
| 373 | Nucleotide sequence | GAGGTGCAATTGGTGGAGTCTGGGGGAGGCGTGGTTC |
| | encoding F010301844 | AGCCTGGGGGGTCTCTGAGACTCTCCTGTGCAGCCTC |
| | | TGGACCCGTGTTCAATATCAACCGCATGGCCTGGTAT |
| | | CGCCAGGCTCCAGGGAAGCAGCGCGAATTGGTCGCA |
| | | TATGTCACCCCTACTGGTGATATAAGTTATACTGACTC |
| | | CGTGAAGGGCCGATTCACCATTTCTCGCGACGGCTCC |
| | | AAGAACTGGTCTCTACAAATGAACAGCCTGCGCCCTG |
| | | AGGACACGGCCCTGTATTACTGTCGCGCTTTACTACA |
| | | ACCGGATAGTTATTCTAATACGCGCACATATTGGGGC |
| | | CAGGGGACCCTGGTCACCGTCTCCTCA |
| 374 | Nucleotide sequence | GAGGTGCAATTGGTGGAGTCTGGGGGAGGCGTGGTTC |
| | encoding F010301845 | AGCCTGGGGGGTCTCTGAGACTCTCCTGTGCAGCCTC |
| | | TGGACCCGTGTTCAATATCAACCGCATGGCCTGGTAT |
| | | CGCCAGGCTCCAGGGAAGCAGCGCGAATTGGTCGCA |
| | | TATGTCACCCCTACTGGTGATATAAGTTATACTGACTC |
| | | CGTGAAGGGCCGATTCACCATTTCTCGCGACGGCTCC |
| | | AAGCGGGTCTCTCTACAAATGAACAGCCTGCGCCCTG |
| | | AGGACACGGCCCTGTATTACTGTCGCGCTTTACTACA |
| | | ACCGGATAGTTATTCTAATACGCGCACATATTGGGGC |
| | | CAGGGGACCCTGGTCACCGTCTCCTCA |
| 375 | Nucleotide sequence | GAGGTGCAATTGGTGGAGTCTGGGGGAGGCGTGGTTC |
| | encoding F010301846 | AGCCTGGGGGGTCTCTGAGACTCTCCTGTGCAGCCTC |
| | | TGGACCCGTGTTCAATATCAACCGCATGGCCTGGTAT |
| | | CGCCAGGCTCCAGGGAAGCAGCGCGAATTGGTCGCA |
| | | TATGTCACCCCTACTGGTGATATAAGTTATACTGACTC |
| | | CGTGAAGGGCCGATTCACCATTTCTCGCGACGGCTCC |
| | | AAGCGGTGGTATCTACAAATGAACAGCCTGCGCCCTG |
| | | AGGACACGGCCCTGTATTACTGTCGCGCTTTACTACA |
| | | ACCGGATAGTTATTCTAATACGCGCACATATTGGGGC |
| | | CAGGGGACCCTGGTCACCGTCTCCTCA |
| 376 | Nucleotide sequence | GAGGTGCAATTGGTGGAGTCTGGGGGAGGCGTGGTTC |
| | encoding F010301847 | AGCCTGGGGGGTCTCTGAGACTCTCCTGTGCAGCCTC |
| | | TGGACCCGTGTTCAATATCAACCGCATGGCCTGGTAT |
| | | CGCCAGGCTCCAGGGAAGCAGCGCGAATTGGTCGCA |
| | | TATGTCACCCCTACTGGTGATATAAGTTATGCGGACT |
| | | CCGTGAAGGGCCGATTCACCATTTCTCGCGACAACTC |
| | | CAAGAACGTGTATCTACAAATGAACAGCCTGCGCCCT |
| | | GAGGACACGGCCCTGTATTACTGTCGCGCTTTACTAC |
| | | AACCGGATAGTTATTCTAATACGCGCACATATTGGGG |
| | | CCAGGGGACCCTGGTCACCGTCTCCTCA |
| 377 | Nucleotide sequence | GAGGTGCAATTGGTGGAGTCTGGGGGAGGCGTGGTTC |
| | encoding F010301848 | AGCCTGGGGGGTCTCTGAGACTCTCCTGTGCAGCCTC |
| | | TGGACCCGTGTTCAATATCAACCGCATGGCCTGGTAT |
| | | CGCCAGGCTCCAGGGAAGCAGCGCGAATTGGTCGCA |
| | | TATGTCACCCCTACTGGTGATATAAGTTATGCGGACT |
| | | CCGTGAAGGGCCGATTCACCATTTCTCGCGACAACTC |
| | | CAAGCGGGTGTATCTACAAATGAACAGCCTGCGCCCT |
| | | GAGGACACGGCCCTGTATTACTGTCGCGCTTTACTAC |
| | | AACCGGATAGTTATTCTAATACGCGCACATATTGGGG |
| | | CCAGGGGACCCTGGTCACCGTCTCCTCA |
| 378 | Nucleotide sequence | GAGGTGCAATTGGTGGAGTCTGGGGGAGGCGTGGTTC |
| | encoding F010301865 | AGCCTGGGGGGTCTCTGAGACTCTCCTGTGCAGCCTC |
| | | TGGACCCGTGTTCAATATCAACCGCATGGCCTGGTAT |
| | | CGCCAGGCTCCAGGGAAGCAGCGCGAATTGGTCGCA |
| | | TATGTCACCCCTACTGGTGATATAAGTTATGCGGACT |
| | | CCGTGAAGGGCCGATTCACCATTTCTCGCGACGGCTC |
| | | CAAGCGGGTGTATCTACAAATGAACAGCCTGCGCCCT |
| | | GAGGACACGGCCCTGTATTACTGTCGCGCTTTACTAC |
| | | AACCGGATAGTTATTCTAATACGCGCACATATTGGGG |
| | | CCAGGGGACCCTGGTCACCGTCTCCTCA |
| 379 | Nucleotide sequence | GAGGTGCAATTGGTGGAGTCTGGGGGAGGCGTGGTTC |
| | encoding F010301866 | AGCCTGGGGGGTCTCTGAGACTCTCCTGTGCAGCCTC |
| | | TGGACCCGTGTTCAATATCAACCGCATGGCCTGGTAT |
| | | CGCCAGGCTCCAGGGAAGCAGCGCGAATTGGTCGCA |
| | | TATGTCACCCCTACTGGTGATATAAGTTATGCGGACT |
| | | CCGTGAAGGGCCGATTCACCATTTCTCGCGACGGCTC |
| | | CAAGAACGTGTATCTACAAATGAACAGCCTGCGCCCT |
| | | GAGGACACGGCCCTGTATTACTGTCGCGCTTTACTAC |
| | | AACCGGATAGTTATTCTAATACGCGCACATATTGGGG |
| | | CCAGGGGACCCTGGTCACCGTCTCCTCA |
| 380 | Nucleotide sequence | GAGGTGCAATTGGTGGAGTCTGGGGGAGGCGTGGTTC |
| | encoding F010302310 | AGCCTGGGGGGTCTCTGAGACTCTCCTGTGCAGCCTC |
| | | TGGACCCGTGTTCAATATCAACCGCATGGCCTGGTAT |
| | | CGCCAGGCTCCAGGGAAGCAGCGCGAATTGGTCGCA |
| | | TATGTCACCCCTACTGGTGATATAAGTTATGCGGACT |
| | | CCGTGAAGGGCCGATTCACCATTTCTCGCGACGCGTC |
| | | CAAGCGGGTGTATCTACAAATGAACAGCCTGCGCCCT |
| | | GAGGACACGGCCCTGTATTACTGTCGCGCTTTACTAC |
| | | AACCGCGCCGCTATTCTAATACGCGCACATATTGGGG |
| | | CCAGGGGACCCTGGTCACCGTCTCCTCA |
| 381 | Nucleotide sequence | GAGGTGCAATTGGTGGAGTCTGGGGGAGGCGTGGTTC |
| | encoding F010302311 | AGCCTGGGGGGTCTCTGAGACTCTCCTGTGCAGCCTC |
| | | TGGACCCGTGTTCAATATCAACCGCATGGCCTGGTAT |
| | | CGCCAGGCTCCAGGGAAGCAGCGCGAATTGGTCGCA |
| | | TATGTCACCCCTACTGGTGATATAAGTTATGCGGACT |
| | | CCGTGAAGGGCCGATTCACCATTTCTCGCGACCGCTC |
| | | CAAGCGGGTGTATCTACAAATGAACAGCCTGCGCCCT |
| | | GAGGACACGGCCCTGTATTACTGTCGCGCTTTACTAC |
| | | AACCGCGCCGCTATTCTAATACGCGCACATATTGGGG |
| | | CCAGGGGACCCTGGTCACCGTCTCCTCA |
| 382 | Nucleotide sequence | GAGGTGCAATTGGTGGAGTCTGGGGGAGGCGTGGTTC |
| | encoding F010302312 | AGCCTGGGGGGTCTCTGAGACTCTCCTGTGCAGCCTC |
| | | TGGACCCGTGTTCAATATCAACCGCATGGCCTGGTAT |
| | | CGCCAGGCTCCAGGGAAGCAGCGCGAATTGGTCGCA |
| | | TATGTCACCCCTACTGGTGATATAAGTTATGCGGACT |
| | | CCGTGAAGGGCCGATTCACCATTTCTCGCGACGGCTC |
| | | CAAGCGGGTGTATCTACAAATGAACAGCCTGCGCCCT |
| | | GAGGACACGGCCCTGTATTACTGTCGCGCTTTACTAC |
| | | AACCGGATAGTTATTCTATTACGCGCACATATTGGGG |
| | | CCAGGGGACCCTGGTCACCGTCTCCTCA |
| 383 | Nucleotide sequence | GAGGTGCAATTGGTGGAGTCTGGGGGAGGCGTGGTTC |
| | encoding F010302313 | AGCCTGGGGGGTCTCTGAGACTCTCCTGTGCAGCCTC |
| | | TGGACCCGTGTTCAATATCAACCGCATGGCCTGGTAT |
| | | CGCCAGGCTCCAGGGAAGCAGCGCGAATTGGTCGCA |
| | | TATGTCACCCCTACTGGTGATATAAGTTATGCGGACT |
| | | CCGTGAAGGGCCGATTCACCATTTCTCGCGACGCGTC |
| | | CAAGCGGGTGTATCTACAAATGAACAGCCTGCGCCCC |
| | | GAGGACACGGCCCTGTATTACTGTCGCGCTTTACTAC |
| | | AACCGGATAGTTATTCTATTACGCGCACATATTGGGG |
| | | CCAGGGGACCCTGGTCACCGTCTCCTCA |
| 384 | Nucleotide sequence | GAGGTGCAATTGGTGGAGTCTGGGGGAGGCGTGGTTC |
| | encoding F010302314 | AGCCTGGGGGGTCTCTGAGACTCTCCTGTGCAGCCTC |
| | | TGGACCCGTGTTCAATATCAACCGCATGGCCTGGTAT |
| | | CGCCAGGCTCCAGGGAAGCAGCGCGAATTGGTCGCA |
| | | TATGTCACCCCTACTGGTGATATAAGTTATGCGGACT |
| | | CCGTGAAGGGCCGATTCACCATTTCTCGCGACCGCTC |
| | | CAAGCGGGTGTATCTACAAATGAACAGCCTGCGCCCT |
| | | GAGGACACGGCCCTGTATTACTGTCGCGCTTTACTAC |
| | | AACCGGATAGTTATTCTATTACGCGCACATATTGGGG |
| | | CCAGGGGACCCTGGTCACCGTCTCCTCA |
| 385 | Nucleotide sequence | GAGGTGCAATTGGTGGAGTCTGGGGGAGGCGTGGTTC |
| | encoding F010302315 | AGCCTGGGGGGTCTCTGAGACTCTCCTGTGCAGCCTC |
| | | TGGACCCGTGTTCAATATCAACCGCATGGCCTGGTAT |
| | | CGCCAGGCTCCAGGGAAGCAGCGCGAATTGGTCGCA |
| | | TATGTCACCCCTACTGGTGATATAAGTTATGCGGACT |
| | | CCGTGAAGGGCCGATTCACCATTTCTCGCGACGGCTC |
| | | CAAGCGGGTGTATCTACAAATGAACAGCCTGCGCCCT |
| | | GAGGACACGGCCCTGTATTACTGTCGCGCTTTACTAC |
| | | AACCGCGCAGTTATTCTATTACGCGCACATATTGGGG |
| | | CCAGGGGACCCTGGTCACCGTCTCCTCA |
| 386 | Nucleotide sequence | GAGGTGCAATTGGTGGAGTCTGGGGGAGGCGTGGTTC |
| | encoding F010302316 | AGCCTGGGGGGTCTCTGAGACTCTCCTGTGCAGCCTC |
| | | TGGACCCGTGTTCAATATCAACCGCATGGCCTGGTAT |
| | | CGCCAGGCTCCAGGGAAGCAGCGCGAATTGGTCGCA |
| | | TATGTCACCCCTACTGGTGATATAAGTTATGCGGACT |
| | | CCGTGAAGGGCCGATTCACCATTTCTCGCGACGCGTC |
| | | CAAGCGGGTGTATCTACAAATGAACAGCCTGCGCCCT |
| | | GAGGACACGGCCCTGTATTACTGTCGCGCTTTACTAC |
| | | AACCGCGCAGTTATTCTATTACGCGCACATATTGGGG |
| | | CCAGGGGACCCTGGTCACCGTCTCCTCA |
| 387 | Nucleotide sequence | GAGGTGCAATTGGTGGAGTCTGGGGGAGGCGTGGTTC |
| | encoding F010302317 | AGCCTGGGGGGTCTCTGAGACTCTCCTGTGCAGCCTC |
| | | TGGACCCGTGTTCAATATCAACCGCATGGCCTGGTAT |
| | | CGCCAGGCTCCAGGGAAGCAGCGCGAATTGGTCGCA |
| | | TATGTCACCCCTACTGGTGATATAAGTTATGCGGACT |
| | | CCGTGAAGGGCCGATTCACCATTTCTCGCGACCGCTC |
| | | CAAGCGGGTGTATCTACAAATGAACAGCCTGCGCCCT |
| | | GAGGACACGGCCCTGTATTACTGTCGCGCTTTACTAC |
| | | AACCGCGCAGTTATTCTATTACGCGCACATATTGGGG |
| | | CCAGGGGACCCTGGTCACCGTCTCCTCA |
| 388 | Nucleotide sequence | GAGGTGCAATTGGTGGAGTCTGGGGGAGGCGTGGTTC |
| | encoding F010302318 | AGCCTGGGGGGTCTCTGAGACTCTCCTGTGCAGCCTC |
| | | TGGACCCGTGTTCAATATCAACCGCATGGCCTGGTAT |
| | | CGCCAGGCTCCAGGGAAGCAGCGCGAATTGGTCGCA |
| | | TATGTCACCCCTACTGGTGATATAAGTTATGCGGACT |
| | | CCGTGAAGGGCCGATTCACCATTTCTCGCGACGGCTC |
| | | CAAGCGGGTGTATCTACAAATGAACAGCCTGCGCCCT |
| | | GAGGACACGGCCCTGTATTACTGTCGCGCTTTACTAC |
| | | AACCGGATCGCTATTCTATTACGCGCACATATTGGGG |
| | | CCAGGGGACCCTGGTCACCGTCTCCTCA |
| 389 | Nucleotide sequence | GAGGTGCAATTGGTGGAGTCTGGGGGAGGCGTGGTTC |
| | encoding F010302319 | AGCCTGGGGGGTCTCTGAGACTCTCCTGTGCAGCCTC |
| | | TGGACCCGTGTTCAATATCAACCGCATGGCCTGGTAT |
| | | CGCCAGGCTCCAGGGAAGCAGCGCGAATTGGTCGCA |
| | | TATGTCACCCCTACTGGTGATATAAGTTATGCGGACT |
| | | CCGTGAAGGGCCGATTCACCATTTCTCGCGACGCGTC |
| | | CAAGCGGGTGTATCTACAAATGAACAGCCTGCGCCCT |
| | | GAGGACACGGCCCTGTATTACTGTCGCGCTTTACTAC |
| | | AACCGGATCGCTATTCTATTACGCGCACATATTGGGG |
| | | CCAGGGGACCCTGGTCACCGTCTCCTCA |
| 390 | Nucleotide sequence | GAGGTGCAATTGGTGGAGTCTGGGGGAGGCGTGGTTC |
| | encoding F010302320 | AGCCTGGGGGGTCTCTGAGACTCTCCTGTGCAGCCTC |
| | | TGGACCCGTGTTCAATATCAACCGCATGGCCTGGTAT |
| | | CGCCAGGCTCCAGGGAAGCAGCGCGAATTGGTCGCA |
| | | TATGTCACCCCTACTGGTGATATAAGTTATGCGGACT |
| | | CCGTGAAGGGCCGATTCACCATTTCTCGCGACGCGTC |
| | | CAAGCGGGTGTATCTACAAATGAACAGCCTGCGCCCT |
| | | GAGGACACGGCCCTGTATTACTGTCGCGCTTTACTAC |
| | | AACCGGATAGTTATTCTAATACGCGCACATATTGGGG |
| | | CCAGGGGACCCTGGTCACCGTCTCCTCA |
| 391 | Nucleotide sequence | GAGGTGCAATTGGTGGAGTCTGGGGGAGGCGTGGTTC |
| | encoding F010302321 | AGCCTGGGGGGTCTCTGAGACTCTCCTGTGCAGCCTC |
| | | TGGACCCGTGTTCAATATCAACCGCATGGCCTGGTAT |
| | | CGCCAGGCTCCAGGGAAGCAGCGCGAATTGGTCGCA |
| | | TATGTCACCCCTACTGGTGATATAAGTTATGCGGACT |
| | | CCGTGAAGGGCCGATTCACCATTTCTCGCGACCGCTC |
| | | CAAGCGGGTGTATCTACAAATGAACAGCCTGCGCCCT |
| | | GAGGACACGGCCCTGTATTACTGTCGCGCTTTACTAC |
| | | AACCGGATCGCTATTCTATTACGCGCACATATTGGGG |
| | | CCAGGGGACCCTGGTCACCGTCTCCTCA |
| 392 | Nucleotide sequence | GAGGTGCAATTGGTGGAGTCTGGGGGAGGCGTGGTTC |
| | encoding F010302322 | AGCCTGGGGGGTCTCTGAGACTCTCCTGTGCAGCCTC |
| | | TGGACCCGTGTTCAATATCAACCGCATGGCCTGGTAT |
| | | CGCCAGGCTCCAGGGAAGCAGCGCGAATTGGTCGCA |
| | | TATGTCACCCCTACTGGTGATATAAGTTATGCGGACT |
| | | CCGTGAAGGGCCGATTCACCATTTCTCGCGACGGCTC |
| | | CAAGCGGGTGTATCTACAAATGAACAGCCTGCGCCCT |
| | | GAGGACACGGCCCTGTATTACTGTCGCGCTTTACTAC |
| | | AACCGCGCCGCTATTCTATTACGCGCACATATTGGGG |
| | | CCAGGGGACCCTGGTCACCGTCTCCTCA |
| 393 | Nucleotide sequence | GAGGTGCAATTGGTGGAGTCTGGGGGAGGCGTGGTTC |
| | encoding F010302323 | AGCCTGGGGGGTCTCTGAGACTCTCCTGTGCAGCCTC |
| | | TGGACCCGTGTTCAATATCAACCGCATGGCCTGGTAT |
| | | CGCCAGGCTCCAGGGAAGCAGCGCGAATTGGTCGCA |
| | | TATGTCACCCCTACTGGTGATATAAGTTATGCGGACT |
| | | CCGTGAAGGGCCGATTCACCATTTCTCGCGACGCGTC |
| | | CAAGCGGGTGTATCTACAAATGAACAGCCTGCGCCCT |
| | | GAGGACACGGCCCTGTATTACTGTCGCGCTTTACTAC |
| | | AACCGCGCCGCTATTCTATTACGCGCACATATTGGGG |
| | | CCAGGGGACCCTGGTCACCGTCTCCTCA |
| 394 | Nucleotide sequence | GAGGTGCAATTGGTGGAGTCTGGGGGAGGCGTGGTTC |
| | encoding F010302324 | AGCCTGGGGGGTCTCTGAGACTCTCCTGTGCAGCCTC |
| | | TGGACCCGTGTTCAATATCAACCGCATGGCCTGGTAT |
| | | CGCCAGGCTCCAGGGAAGCAGCGCGAATTGGTCGCA |
| | | TATGTCACCCCTACTGGTGATATAAGTTATGCGGACT |
| | | CCGTGAAGGGCCGATTCACCATTTCTCGCGACCGCTC |
| | | CAAGCGGGTGTATCTACAAATGAACAGCCTGCGCCCT |
| | | GAGGACACGGCCCTGTATTACTGTCGCGCTTTACTAC |
| | | AACCGCGCCGCTATTCTATTACGCGCACATATTGGGG |
| | | CCAGGGGACCCTGGTCACCGTCTCCTCA |
| 395 | Nucleotide sequence | GAGGTGCAATTGGTGGAGTCTGGGGGAGGCGTGGTTC |
| | encoding F010302325 | AGCCTGGGGGGTCTCTGAGACTCTCCTGTGCAGCCTC |
| | | TGGACCCGTGTTCAATATCAACCGCATGGCCTGGTAT |
| | | CGCCAGGCTCCAGGGAAGCAGCGCGAATTGGTCGCA |
| | | TATGTCACCCCTACTGGTGATATAAGTTATGCGGACT |
| | | CCGTGAAGGGCCGATTCACCATTTCTCGCGACCGCTC |
| | | CAAGCGGGTGTATCTACAAATGAACAGCCTGCGCCCT |
| | | GAGGACACGGCCCTGTATTACTGTCGCGCTTTACTAC |
| | | AACCGGATAGTTATTCTAATACGCGCACATATTGGGG |
| | | CCAGGGGACCCTGGTCACCGTCTCCTCA |
| 396 | Nucleotide sequence | GAGGTGCAATTGGTGGAGTCTGGGGGAGGCGTGGTTC |
| | encoding F010302326 | AGCCTGGGGGGTCTCTGAGACTCTCCTGTGCAGCCTC |
| | | TGGACCCGTGTTCAATATCAACCGCATGGCCTGGTAT |
| | | CGCCAGGCTCCAGGGAAGCAGCGCGAATTGGTCGCA |
| | | TATGTCACCCCTACTGGTGATATAAGTTATGCGGACT |
| | | CCGTGAAGGGCCGATTCACCATTTCTCGCGACGGCTC |
| | | CAAGCGGGTGTATCTACAAATGAACAGCCTGCGCCCT |
| | | GAGGACACGGCCCTGTATTACTGTCGCGCTTTACTAC |
| | | AACCGCGCAGTTATTCTAATACGCGCACATATTGGGG |
| | | CCAGGGGACCCTGGTCACCGTCTCCTCA |
| 397 | Nucleotide sequence | GAGGTGCAATTGGTGGAGTCTGGGGGAGGCGTGGTTC |
| | encoding F010302327 | AGCCTGGGGGGTCTCTGAGACTCTCCTGTGCAGCCTC |
| | | TGGACCCGTGTTCAATATCAACCGCATGGCCTGGTAT |
| | | CGCCAGGCTCCAGGGAAGCAGCGCGAATTGGTCGCA |
| | | TATGTCACCCCTACTGGTGATATAAGTTATGCGGACT |
| | | CCGTGAAGGGCCGATTCACCATTTCTCGCGACGCGTC |
| | | CAAGCGGGTGTATCTACAAATGAACAGCCTGCGCCCT |
| | | GAGGACACGGCCCTGTATTACTGTCGCGCTTTACTAC |
| | | AACCGCGCAGTTATTCTAATACGCGCACATATTGGGG |
| | | CCAGGGGACCCTGGTCACCGTCTCCTCA |
| 398 | Nucleotide sequence | GAGGTGCAATTGGTGGAGTCTGGGGGAGGCGTGGTTC |
| | encoding F010302328 | AGCCTGGGGGGTCTCTGAGACTCTCCTGTGCAGCCTC |
| | | TGGACCCGTGTTCAATATCAACCGCATGGCCTGGTAT |
| | | CGCCAGGCTCCAGGGAAGCAGCGCGAATTGGTCGCA |
| | | TATGTCACCCCTACTGGTGATATAAGTTATGCGGACT |
| | | CCGTGAAGGGCCGATTCACCATTTCTCGCGACCGCTC |
| | | CAAGCGGGTGTATCTACAAATGAACAGCCTGCGCCCT |
| | | GAGGACACGGCCCTGTATTACTGTCGCGCTTTACTAC |
| | | AACCGCGCAGTTATTCTAATACGCGCACATATTGGGG |
| | | CCAGGGGACCCTGGTCACCGTCTCCTCA |
| 399 | Nucleotide sequence | GAGGTGCAATTGGTGGAGTCTGGGGGAGGCGTGGTTC |
| | encoding F010302329 | AGCCTGGGGGGTCTCTGAGACTCTCCTGTGCAGCCTC |
| | | TGGACCCGTGTTCAATATCAACCGCATGGCCTGGTAT |
| | | CGCCAGGCTCCAGGGAAGCAGCGCGAATTGGTCGCA |
| | | TATGTCACCCCTACTGGTGATATAAGTTATGCGGACT |
| | | CCGTGAAGGGCCGATTCACCATTTCTCGCGACGGCTC |
| | | CAAGCGGGTGTATCTACAAATGAACAGCCTGCGCCCT |
| | | GAGGACACGGCCCTGTATTACTGTCGCGCTTTACTAC |
| | | AACCGGATCGCTATTCTAATACGCGCACATATTGGGG |
| | | CCAGGGGACCCTGGTCACCGTCTCCTCA |
| 400 | Nucleotide sequence | GAGGTGCAATTGGTGGAGTCTGGGGGAGGCGTGGTTC |
| | encoding F010302330 | AGCCTGGGGGGTCTCTGAGACTCTCCTGTGCAGCCTC |
| | | TGGACCCGTGTTCAATATCAACCGCATGGCCTGGTAT |
| | | CGCCAGGCTCCAGGGAAGCAGCGCGAATTGGTCGCA |
| | | TATGTCACCCCTACTGGTGATATAAGTTATGCGGACT |
| | | CCGTGAAGGGCCGATTCACCATTTCTCGCGACGCGTC |
| | | CAAGCGGGTGTATCTACAAATGAACAGCCTGCGCCCT |
| | | GAGGACACGGCCCTGTATTACTGTCGCGCTTTACTAC |
| | | AACCGGATCGCTATTCTAATACGCGCACATATTGGGG |
| | | CCAGGGGACCCTGGTCACCGTCTCCTCA |
| 401 | Nucleotide sequence | GAGGTGCAATTGGTGGAGTCTGGGGGAGGCGTGGTTC |
| | encoding F010302331 | AGCCTGGGGGGTCTCTGAGACTCTCCTGTGCAGCCTC |
| | | TGGACCCGTGTTCAATATCAACCGCATGGCCTGGTAT |
| | | CGCCAGGCTCCAGGGAAGCAGCGCGAATTGGTCGCA |
| | | TATGTCACCCCTACTGGTGATATAAGTTATGCGGACT |
| | | CCGTGAAGGGCCGATTCACCATTTCTCGCGACCGCTC |
| | | CAAGCGGGTGTATCTACAAATGAACAGCCTGCGCCCT |
| | | GAGGACACGGCCCTGTATTACTGTCGCGCTTTACTAC |
| | | AACCGGATCGCTATTCTAATACGCGCACATATTGGGG |
| | | CCAGGGGACCCTGGTCACCGTCTCCTCA |
| 402 | Nucleotide sequence | GAGGTGCAATTGGTGGAGTCTGGGGGAGGCGTGGTTC |
| | encoding F010302332 | AGCCTGGGGGGTCTCTGAGACTCTCCTGTGCAGCCTC |
| | | TGGACCCGTGTTCAATATCAACCGCATGGCCTGGTAT |
| | | CGCCAGGCTCCAGGGAAGCAGCGCGAATTGGTCGCA |
| | | TATGTCACCCCTACTGGTGATATAAGTTATGCGGACT |
| | | CCGTGAAGGGCCGATTCACCATTTCTCGCGACGGCTC |
| | | CAAGCGGGTGTATCTACAAATGAACAGCCTGCGCCCT |
| | | GAGGACACGGCCCTGTATTACTGTCGCGCTTTACTAC |
| | | AACCGCGCCGCTATTCTAATACGCGCACATATTGGGG |
| | | CCAGGGGACCCTGGTCACCGTCTCCTCA |
| 403 | Nucleotide sequence | GAGGTGCAATTGGTGGAGTCTGGGGGAGGCGTGGTTC |
| | encoding F010302370 | AGCCTGGGGGGTCTCTGAGACTCTCCTGTGCAGCCTC |
| | | TGGACCCGTGTTCAATATCAACCGCATGGCCTGGTAT |
| | | CGCCAGGCTCCAGGGAAGCAGCGCGAATTGGTCGCA |
| | | TATGTCACCCCTACTGGTGATATAAGTTATGCGGACT |
| | | CCGTGAAGGGCCGATTCACCATTTCTCGCGACCGCTC |
| | | CAAGCGGGTGTATCTACAAATGAACAGCCTGCGCCCT |
| | | GAGGACACGGCCCTGTATTACTGTCGCGCTTTACTAC |
| | | AACCGAGCAGTTATTCTATTACGCGCACATATTGGGG |
| | | CCAGGGGACCCTGGTCACCGTCTCCTCA |
| 404 | Nucleotide sequence | GAGGTGCAATTGGTGGAGTCTGGGGGAGGCGTGGTTC |
| | encoding F010302371 | AGCCTGGGGGGTCTCTGAGACTCTCCTGTGCAGCCTC |
| | | TGGACCCGTGTTCAATATCAACCGCATGGCCTGGTAT |
| | | CGCCAGGCTCCAGGGAAGCAGCGCGAATTGGTCGCA |
| | | TATGTCACCCCTACTGGTGATATAAGTTATGCGGACT |
| | | CCGTGAAGGGCCGATTCACCATTTCTCGCGACCGCTC |
| | | CAAGCGGGTGTATCTACAAATGAACAGCCTGCGCCCT |
| | | GAGGACACGGCCCTGTATTACTGTCGCGCTTTACTAC |
| | | AACCGAACGTGTATTCTATTACGCGCACATATTGGGG |
| | | CCAGGGGACCCTGGTCACCGTCTCCTCA |
| 405 | Nucleotide sequence | GAGGTGCAATTGGTGGAGTCTGGGGGAGGCGTGGTTC |
| | encoding F010302372 | AGCCTGGGGGGTCTCTGAGACTCTCCTGTGCAGCCTC |
| | | TGGACCCGTGTTCAATATCAACCGCATGGCCTGGTAT |
| | | CGCCAGGCTCCAGGGAAGCAGCGCGAATTGGTCGCA |
| | | TATGTCACCCCTACTGGTGATATAAGTTATGCGGACT |
| | | CCGTGAAGGGCCGATTCACCATTTCTCGCGACCGCTC |
| | | CAAGCGGGTGTATCTACAAATGAACAGCCTGCGCCCT |
| | | GAGGACACGGCCCTGTATTACTGTCGCGCTTTACTAC |
| | | AACCGGATGTGTATTCTATTACGCGCACATATTGGGG |
| | | CCAGGGGACCCTGGTCACCGTCTCCTCA |
| 406 | Nucleotide sequence | GAGGTGCAATTGGTGGAGTCTGGGGGAGGCGTGGTTC |
| | encoding F010302383 | AGCCTGGGGGGTCTCTGAGACTCTCCTGTGCAGCCTC |
| | | TGGACCCGTGTTCAATATCAACCGCATGGCCTGGTAT |
| | | CGCCAGGCTCCAGGGAAGCAGCGCGAATTGGTCGCA |
| | | TATGTCACCCCTACTGGTGATATAAGTTATGCGGACT |
| | | CCGTGAAGGGCCGATTCACCATTTCTCGCGGTGGCTC |
| | | CAAGCGGGTGTATCTACAAATGAACAGCCTGCGCCCT |
| | | GAGGACACGGCCCTGTATTACTGTCGCGCTTTACTAC |
| | | AACCGAGCAGTTATTCTGGCACGCGCACATATTGGGG |
| | | CCAGGGGACCCTGGTCACCGTCTCCTCA |
| 407 | Nucleotide sequence | GAGGTGCAATTGGTGGAGTCTGGGGGAGGCGTGGTTC |
| | encoding F010302384 | AGCCTGGGGGGTCTCTGAGACTCTCCTGTGCAGCCTC |
| | | TGGACCCGTGTTCAATATCAACCGCATGGCCTGGTAT |
| | | CGCCAGGCTCCAGGGAAGCAGCGCGAATTGGTCGCA |
| | | TATGTCACCCCTACTGGTGATATAAGTTATGCGGACT |
| | | CCGTGAAGGGCCGATTCACCATTTCTCGCGGTGGCTC |
| | | CAAGCGGGTGTATCTACAAATGAACAGCCTGCGCCCT |
| | | GAGGACACGGCCCTGTATTACTGTCGCGCTTTACTAC |
| | | AACCGAGCAGTTATTCTATTACGCGCACATATTGGGG |
| | | CCAGGGGACCCTGGTCACCGTCTCCTCA |
| 408 | Nucleotide sequence | GAGGTGCAATTGGTGGAGTCTGGGGGAGGCGTGGTTC |
| | encoding F010302385 | AGCCTGGGGGGTCTCTGAGACTCTCCTGTGCAGCCTC |
| | | TGGACCCGTGTTCAATATCAACCGCATGGCCTGGTAT |
| | | CGCCAGGCTCCAGGGAAGCAGCGCGAATTGGTCGCA |
| | | TATGTCACCCCTACTGGTGATATAAGTTATGCGGACT |
| | | CCGTGAAGGGCCGATTCACCATTTCTCGCCAGGGCTC |
| | | CAAGCGGGTGTATCTACAAATGAACAGCCTGCGCCCT |
| | | GAGGACACGGCCCTGTATTACTGTCGCGCTTTACTAC |
| | | AACCGAGCAGTTATTCTGGCACGCGCACATATTGGGG |
| | | CCAGGGGACCCTGGTCACCGTCTCCTCA |
| 409 | Nucleotide sequence | GAGGTGCAATTGGTGGAGTCTGGGGGAGGCGTGGTTC |
| | encoding F010302386 | AGCCTGGGGGGTCTCTGAGACTCTCCTGTGCAGCCTC |
| | | TGGACCCGTGTTCAATATCAACCGCATGGCCTGGTAT |
| | | CGCCAGGCTCCAGGGAAGCAGCGCGAATTGGTCGCA |
| | | TATGTCACCCCTACTGGTGATATAAGTTATGCGGACT |
| | | CCGTGAAGGGCCGATTCACCATTTCTCGCCAGGGCTC |
| | | CAAGCGGGTGTATCTACAAATGAACAGCCTGCGCCCT |
| | | GAGGACACGGCCCTGTATTACTGTCGCGCTTTACTAC |
| | | AACCGAGCAGTTATTCTATTACGCGCACATATTGGGG |
| | | CCAGGGGACCCTGGTCACCGTCTCCTCA |
| 410 | F0103240B04 (No tag) | EVQLVESGGGLVQAGGSLRLSCAASGGTGRRYAMGWF |
| | | RQAPGKEREIVAAIRWSAMTYYADDGKGRFTISRDNAK |
| | | NTVYLQMNSLKPEDTAIYYCAYTWDYFKYDQVRAYRG |
| | | WGQGTLVTVSS |
| 411 | F0103478E09 (No tag) | EVQLVESGGGLVQAGGSLRLSCAASGRAFSTLAMGWF |
| | | RQAPGKEREFVAAISRNGNNSATGDSLKGRFTISRDSTK |
| | | STVF |
| | | LQMNTLKPEDTAVYYCAAISTPSASHPYVRKESYRYWG |
| | | QGTLVTVSS |
| 412 | F0103492E09 (No tag) | EVQLVESGGGLVQAGGSLRLSCAASKSILSFAYMRWYR |
| | | QAPGKQREFVASIAIGGATSYTDSVKGRFTISRDNAKNT |
| | | VYLQMNSLKPEDTAVYYCSAPAGQYRGQGTLVTVSS |
| 413 | F0103500E03 (No tag) | EVQLVESGGGLVQPGGSLRLSCAASGRTFSRYQMGWFR |
| | | QAPGKEREFVAYISWSGSTRYVDSVKGRFTISRDNAKNT |
| | | VYLQMNSLKPEDTAVYHCAAGTAGIISSRPETYDSWGQ |
| | | GTLVTVSS |
| 414 | F0103505D08 (No tag) | EVQLVESGGGLVQAGGSLRLSCVTSGRTSDLSTMNWFR |
| | | QAPGKEREFVARITRRGSTYYAESVKERFIISRDNAKNT |
| | | VYL |
| | | QMNSLKPEDTANYYCTAASEMGYHYRGQGTLVTVSS |
| 415 | F0103495F09 (No tag) | EVQLVESGGGLVQAGSSLSLSCAASGRALSTYAMGWFR |
| | | QAPGKEREFVARISRSGITTYYTDSVKGRFTISRDRAKDT |
| | | VY |
| | | LQMNSLKPEDTAIYLCAADASTNPAGYYLRNRYDYWG |
| | | QGTLVTVSS |
| 416 | F0103240B04-CDR1 | GGTGRRYAMGW |
| 417 | F0103240B04-CDR2 | AIRWSAMTY |
| 418 | F0103240B04-CDR3 | TWDYFKYDQVRAYRG |
| 419 | F0103478E09-CDR1 | GRAFSTLAMG |
| 420 | F0103478E09-CDR2 | ISRNGNNS |
| 421 | F0103478E09-CDR3 | ISTPSASHPYVRKESYRY |
| 422 | F0103492E09-CDR1 | KSILSFAYMR |
| 423 | F0103492E09-CDR2 | SIAIGGATS |
| 424 | F0103492E09-CDR3 | PAGQYR |
| 425 | F0103500E03-CDR1 | GRTFSRYQMG |
| 426 | F0103500E03-CDR2 | YISWSGSTR |
| 427 | F0103500E03-CDR3 | GTAGIISSRPETYDS |
| 428 | F0103505D08-CDR1 | GRTSDLSTMN |
| 429 | F0103505D08-CDR2 | RITRRGSTY |
| 430 | F0103505D08-CDR3 | ASEMGYHYR |
| 431 | F0103495F09-CDR1 | GRALSTYAMG |
| 432 | F0103495F09-CDR2 | RISRSGITT |
| 433 | F0103495F09-CDR3 | DASTNPAGYYLRNRYDY |
| 434 | F103275B05(N93R) | EVQLVESGGGLVQPGGSLRLSCAASGSIFNINSMA |
| | | WYRRAPGKQRELVASSTNGGSTNYADSVKGRFTIS |
| | | RDNAKRVYLQMNSLTPEDTAVYYCRALLQPSIYDI |
| | | SRTYWGQGTLVTVSS |
| 435 | F0103275B05 | DVQLVESGGGLVQPGGSLRLSCAASGSIFNINSMA |
| | (E1D, N93R) | WYRRAPGKQRELVASSTNGGSTNYADSVKGRFTIS |
| | | RDNAKRVYLQMNSLTPEDTAVYYCRALLQPSIYDI |
| | | SRTYWGQGTLVTVSS |
| 436 | F0103478E09 (L108Q) | EVQLVESGGGLVQAGGSLRLSCAASGRAFSTLAMGWF |
| | | RQAPGKEREFVAAISRNGNNSATGDSLKGRFTISRDSTK |
| | | STVFLQMNTLKPEDTAVYYCAAISTPSASHPYVRKESYR |
| | | YWGQGTQVTVSS |
| 437 | F0103505D08 (L108Q) | EVQLVESGGGLVQAGGSLRLSCVTSGRTSDLSTMNWFR |
| | | QAPGKEREFVARITRRGSTYYAESVKERFIISRDNAKNT |
| | | VYLQMNSLKPEDTANYYCTAASEMGYHYRGQGTQVT |
| | | VSS |
| 438 | F0103500E03 | EVQLVESGGGLVQAGGSLRLSCAASGRTFSRYQMGWF |
| | (P14A, L108Q) | RQAPGKEREFVAYISWSGSTRYVDSVKGRFTISRDNAK |
| | | NTVYLQMNSLKPEDTAVYHCAAGTAGIISSRPETYDSW |
| | | GQGTQVTVSS |
| 439 | F010302375:F0103275B05 | DVQLVESGGGLVQPGGSLRLSCAASGSIFNINSMAWYR |
| | (E1D, N93R)-50GS- | RAPGKQRELVASSTNGGSTNYADSVKGRFTISRDNAKR |
| | F0103478E09(L108Q)- | VYLQMNSLTPEDTAVYYCRALLQPSIYDISRTYWGQGT |
| | FLAG3-HIS6 | LVTVSSGGGGSGGGGSGGGGSGGGGSGGGGSGGGGSG |
| | | GGGSGGGGSGGGGSGGGGSEVQLVESGGGLVQAGGSL |
| | | RLSCAASGRAFSTLAMGWFRQAPGKEREFVAAISRNGN |
| | | NSATGDSLKGRFTISRDSTKSTVFLQMNTLKPEDTAVYY |
| | | CAAISTPSASHPYVRKESYRYWGQGTQVTVSSGAADYK |
| | | DHDGDYKDHDIDYKDDDDKGAAHHHHHH |
| 440 | F010302377:F0103275B05 | DVQLVESGGGLVQPGGSLRLSCAASGSIFNINSMAWYR |
| | (E1D, N93R)-50GS- | RAPGKQRELVASSTNGGSTNYADSVKGRFTISRDNAKR |
| | F0103492E09-FLAG3- | VYLQMNSLTPEDTAVYYCRALLQPSIYDISRTYWGQGT |
| | HIS6 | LVTVSSGGGGSGGGGSGGGGSGGGGSGGGGSGGGGSG |
| | | GGGSGGGGSGGGGSGGGGSEVQLVESGGGLVQAGGSL |
| | | RLSCAASKSILSFAYMRWYRQAPGKQREFVASIAIGGAT |
| | | SYTDSVKGRFTISRDNAKNTVYLQMNSLKPEDTAVYYC |
| | | SAPAGQYRGQGTLVTVSSGAADYKDHDGDYKDHDIDY |
| | | KDDDDKGAAHHHHHH |
| 441 | F010302378:F0103275B05 | DVQLVESGGGLVQPGGSLRLSCAASGSIFNINSMAWYR |
| | (E1D,N93R)-50GS- | RAPGKQRELVASSTNGGSTNYADSVKGRFTISRDNAKR |
| | F0103495F09-FLAG3- | VYLQMNSLTPEDTAVYYCRALLQPSIYDISRTYWGQGT |
| | HIS6 | LVTVSSGGGGSGGGGSGGGGSGGGGSGGGGSGGGGSG |
| | | GGGSGGGGSGGGGSGGGGSEVQLVESGGGLVQAGSSL |
| | | SLSCAASGRALSTYAMGWFRQAPGKEREFVARISRSGIT |
| | | TYYTDSVKGRFTISRDRAKDTVYLQMNSLKPEDTAIYLC |
| | | AADASTNPAGYYLRNRYDYWGQGTLVTVSSGAADYK |
| | | DHDGDYKDHDIDYKDDDDKGAAHHHHHH |
| 442 | F010302379:F0103275B05 | DVQLVESGGGLVQPGGSLRLSCAASGSIFNINSMAWYR |
| | (E1D, N93R)-50GS- | RAPGKQRELVASSTNGGSTNYADSVKGRFTISRDNAKR |
| | F0103500E03(P14A, L108Q)- | VYLQMNSLTPEDTAVYYCRALLQPSIYDISRTYWGQGT |
| | FLAG3-HIS6 | LVTVSSGGGGSGGGGSGGGGSGGGGSGGGGSGGGGSG |
| | | GGGSGGGGSGGGGSGGGGSEVQLVESGGGLVQAGGSL |
| | | RLSCAASGRTFSRYQMGWFRQAPGKEREFVAYISWSGS |
| | | TRYVDSVKGRFTISRDNAKNTVYLQMNSLKPEDTAVYH |
| | | CAAGTAGIISSRPETYDSWGQGTQVTVSSGAADYKDHD |
| | | GDYKDHDIDYKDDDDKGAAHHHHHH |
| 443 | F010302380:F0103275B05 | DVQLVESGGGLVQPGGSLRLSCAASGSIFNINSMA |
| | (E1D, N93R)-50GS- | WYRRAPGKQRELVASSTNGGSTNYADSVKGRFTIS |
| | F0103505D08(L108Q)- | RDNAKRVYLQMNSLTPEDTAVYYCRALLQPSIYDI |
| | FLAG3-HIS6 | SRTYWGQGTLVTVSSGGGGSGGGGSGGGGSGGGG |
| | | SGGGGSGGGGSGGGGSGGGGSGGGGSGGGGSEVQ |
| | | LVESGGGLVQAGGSLRLSCVTSGRTSDLSTMNWFR |
| | | QAPGKEREFVARITRRGSTYYAESVKERFIISRDNA |
| | | KNTVYLQMNSLKPEDTANYYCTAASEMGYHYRG |
| | | QGTQVTVSSGAADYKDHDGDYKDHDIDYKDDDD |
| | | KGAAHHHHHH |
| 444 | F010300191:F0103275B05- | EVQLVESGGGLVQPGGSLRLSCAASGSIFNINSMAWYR |
| | 50GS- | RAPGKQRELVASSTNGGSTNYADSVKGRFTISRDNAKR |
| | F0103240B04-FLAG3- | VYLQMNSLTPEDTAVYYCNALLQPSIYDISRTYWGQGT |
| | HIS6 | LVTVSSGGGGSGGGGSGGGGSGGGGSGGGGSGGGGSG |
| | | GGGSGGGGSGGGGSGGGGSEVQLVESGGGLVQAGGSL |
| | | RLSCAASGGTGRRYAMGWFRQAPGKEREIVAAIRWSA |
| | | MTYYADDGKGRFTISRDNAKNTVYLQMNSLKPEDTAIY |
| | | YCAYTWDYFKYDQVRAYRGWGQGTLVTVSSGAADYK |
| | | DHDGDYKDHDIDYKDDDDKGAAHHHHHH |
| 445 | F010302375 (No Tag): | DVQLVESGGGLVQPGGSLRLSCAASGSIFNINSMAWYR |
| | F0103275B05(E1D, N93R)- | RAPGKQRELVASSTNGGSTNYADSVKGRFTISRDNAKR |
| | 50GS- | VYLQMNSLTPEDTAVYYCRALLQPSIYDISRTYWGQGT |
| | F0103478E09(L108Q) | LVTVSSGGGGSGGGGSGGGGSGGGGSGGGGSGGGGSG |
| | | GGGSGGGGSGGGGSGGGGSEVQLVESGGGLVQAGGSL |
| | | RLSCAASGRAFSTLAMGWFRQAPGKEREFVAAISRNGN |
| | | NSATGDSLKGRFTISRDSTKSTVFLQMNTLKPEDTAVYY |
| | | CAAISTPSASHPYVRKESYRYWGQGTQVTVSS |
| 446 | F010302377 (No | DVQLVESGGGLVQPGGSLRLSCAASGSIFNINSMAWYR |
| | Tag):F0103275B05 | RAPGKQRELVASSTNGGSTNYADSVKGRFTISRDNAKR |
| | (E1D, N93R)-50GS- | VYLQMNSLTPEDTAVYYCRALLQPSIYDISRTYWGQGT |
| | F0103492E09 | LVTVSSGGGGSGGGGSGGGGSGGGGSGGGGSGGGGSG |
| | | GGGSGGGGSGGGGSGGGGSEVQLVESGGGLVQAGGSL |
| | | RLSCAASKSILSFAYMRWYRQAPGKQREFVASIAIGGAT |
| | | SYTDSVKGRFTISRDNAKNTVYLQMNSLKPEDTAVYYC |
| | | SAPAGQYRGQGTLVTVSS |
| 447 | F010302378 (No | DVQLVESGGGLVQPGGSLRLSCAASGSIFNINSMAWYR |
| | Tag):F0103275B05 | RAPGKQRELVASSTNGGSTNYADSVKGRFTISRDNAKR |
| | (E1D, 93R)-50GS- | VYLQMNSLTPEDTAVYYCRALLQPSIYDISRTYWGQGT |
| | F0103495F09 | LVTVSSGGGGSGGGGSGGGGSGGGGSGGGGSGGGGSG |
| | | GGGSGGGGSGGGGSGGGGSEVQLVESGGGLVQAGSSL |
| | | SLSCAASGRALSTYAMGWFRQAPGKEREFVARISRSGIT |
| | | TYYTDSVKGRFTISRDRAKDTVYLQMNSLKPEDTAIYLC |
| | | AADASTNPAGYYLRNRYDYWGQGTLVTVSS |
| 448 | F010302379 (No | DVQLVESGGGLVQPGGSLRLSCAASGSIFNINSMAWYR |
| | Tag):F0103275B05 | RAPGKQRELVASSTNGGSTNYADSVKGRFTISRDNAKR |
| | (E1D, N93R)-50GS- | VYLQMNSLTPEDTAVYYCRALLQPSIYDISRTYWGQGT |
| | F0103500E03(P14A, L108Q) | LVTVSSGGGGSGGGGSGGGGSGGGGSGGGGSGGGGSG |
| | | GGGSGGGGSGGGGSGGGGSEVQLVESGGGLVQAGGSL |
| | | RLSCAASGRTFSRYQMGWFRQAPGKEREFVAYISWSGS |
| | | TRYVDSVKGRFTISRDNAKNTVYLQMNSLKPEDTAVYH |
| | | CAAGTAGIISSRPETYDSWGQGTQVTVSS |
| 449 | F010302380 (No | DVQLVESGGGLVQPGGSLRLSCAASGSIFNINSMA |
| | Tag):F0103275B05 | WYRRAPGKQRELVASSTNGGSTNYADSVKGRFTIS |
| | (E1D, N93R)-50GS- | RDNAKRVYLQMNSLTPEDTAVYYCRALLQPSIYDI |
| | F0103505D08(L108Q) | SRTYWGQGTLVTVSSGGGGSGGGGSGGGGSGGGG |
| | | SGGGGSGGGGSGGGGSGGGGSGGGGSGGGGSEVQ |
| | | LVESGGGLVQAGGSLRLSCVTSGRTSDLSTMNWFR |
| | | QAPGKEREFVARITRRGSTYYAESVKERFIISRDNA |
| | | KNTVYLQMNSLKPEDTANYYCTAASEMGYHYRG |
| | | QGTQVTVSS |
| 450 | F010300191 (No | EVQLVESGGGLVQPGGSLRLSCAASGSIFNINSMA |
| | Tag):F0103275B05- | WYRRAPGKQRELVASSTNGGSTNYADSVKGRFTIS |
| | 50GS-F0103240B04 | RDNAKRVYLQMNSLTPEDTAVYYCNALLQPSIYDI |
| | | SRTYWGQGTLVTVSSGGGGSGGGGSGGGGSGGGG |
| | | SGGGGSGGGGSGGGGSGGGGSGGGGSGGGGSEVQ |
| | | LVESGGGLVQAGGSLRLSCAASGGTGRRYAMGWF |
| | | RQAPGKEREIVAAIRWSAMTYYADDGKGRFTISRD |
| | | NAKNTVYLQMNSLKPEDTAIYYCAYTWDYFKYDQ |
| | | VRAYRGWGQGTLVTVSS |
| 451 | F0103PMP478E09 | EVQLVESGGGLVQAGGSLRLSCAASGRAFSTLAM |
| | | GWFRQAPGKEREFVAAISRNGNNSATGDSLKGRFT |
| | | ISRDSTKSTVFLQMNTLKPEDTAVYYCAAISTPSAS |
| | | HPYVRKESYRYWGQGTQVTVSSAAADYKDHDGD |
| | | YKDHDIDYKDDDDKGAAHHHHHHKAAGGGGG |
| 452 | F0103PMP492E09 | EVQLVESGGGLVQAGGSLRLSCAASKSILSFAYMRWYR |
| | | QAPGKQREFVASIAIGGATSYTDSVKGRFTISRDNAKNT |
| | | VYLQMNSLKPEDTAVYYCSAPAGQYRGQGTLVTVSSA |
| | | AADYKDHDGDYKDHDIDYKDDDDKGAAHHHHHHKA |
| | | AGGGGG |
| 453 | F0103PMP495F09 | EVQLVESGGGLVQAGSSLSLSCAASGRALSTYAMGWFR |
| | | QAPGKEREFVARISRSGITTYYTDSVKGRFTISRDRAKDT |
| | | VY |
| | | LQMNSLKPEDTAIYLCAADASTNPAGYYLRNRYDYWG |
| | | QGTLVTVSSAAADYKDHDGDYKDHDIDYKDDDDKGA |
| | | AHHHHHHKAAGGGGG |
| 454 | F0103PMP500E03 | EVQLVESGGGLVQAGGSLRLSCAASGRTFSRYQMGWF |
| | | RQAPGKEREFVAYISWSGSTRYVDSVKGRFTISRDNAK |
| | | NTVYLQMNSLKPEDTAVYHCAAGTAGIISSRPETYDSW |
| | | GQGTQVTVSSAAADYKDHDGDYKDHDIDYKDDDDKG |
| | | AAHHHHHHKAA |
| 455 | F0103PMP505D08 | EVQLVESGGGLVQAGGSLRLSCVTSGRTSDLSTMNWFR |
| | | QAPGKEREFVARITRRGSTYYAESVKERFIISRDNAKNT |
| | | VYL |
| | | QMNSLKPEDTANYYCTAASEMGYHYRGQGTQVTVSSA |
| | | AADYKDHDGDYKDHDIDYKDDDDKGAAHHHHHHKA |
| | | AGGGGG |
| 456 | Nucleotide sequence | ATGAAAAAGACCGCTATCGCGATTGCAGTGGCACTGG |
| | encoding F0103240B04 | CTGGTTTGGCCACCGTGGCCCAGGCCGAGGTGCAATT |
| | (No tag) | GGTGGAGTCTGGGGGAGGATTGGTGCAGGCTGGGGG |
| | | CTCTCTGAGACTCTCCTGTGCAGCCTCTGGAGGTACA |
| | | GGCAGGAGATATGCCATGGGCTGGTTCCGCCAGGCTC |
| | | CAGGGAAGGAGCGTGAAATTGTAGCAGCGATTAGGT |
| | | GGAGTGCTATGACATACTATGCAGACGACGGGAAGG |
| | | GCCGATTCACCATCTCCAGAGACAACGCCAAGAACAC |
| | | GGTGTATCTCCAAATGAACAGCCTGAAACCTGAGGAC |
| | | ACGGCCATTTATTACTGTGCATACACTTGGGACTATTT |
| | | CAAGTATGACCAAGTCCGAGCGTATCGCGGCTGGGGC |
| | | CAGGGGACCCTGGTCACCGTCTCCTCA |
| 457 | Nucleotide sequence | ATGAAAAAGACCGCTATCGCGATTGCAGTGGCACTGG |
| | encoding F0103478E09 | CTGGTTTGGCCACCGTGGCCCAGGCCGAGGTGCAATT |
| | (No tag) | GGTGGAGTCTGGGGGAGGCTTGGTGCAGGCTGGGGG |
| | | GTCTCTGAGACTCTCCTGTGCTGCCTCTGGACGCGCCT |
| | | TCAGTACCTTGGCCATGGGCTGGTTCCGCCAGGCTCC |
| | | AGGGAAGGAGCGTGAGTTTGTAGCAGCTATTAGCCG |
| | | GAATGGTAATAACTCAGCCACTGGAGACTCCCTGAAG |
| | | GGCCGATTCACCATCTCCAGAGACAGCACCAAGAGC |
| | | ACGGTTTTTCTGCAAATGAATACGCTGAAACCTGAGG |
| | | ACACGGCCGTATATTACTGTGCAGCCATCTCGACACC |
| | | GTCCGCCAGTCATCCATACGTTCGCAAGGAAAGTTAT |
| | | AGATACTGGGGCCAGGGTACCCTGGTCACCGTCTCCT |
| | | CA |
| 458 | Nucleotide sequence | ATGAAAAAGACCGCTATCGCGATTGCAGTGGCACTGG |
| | encoding F0103492E09 | CTGGTTTGGCCACCGTGGCCCAGGCCGAGGTGCAATT |
| | (No tag) | GGTGGAGTCTGGGGGAGGCTTGGTGCAGGCTGGGGG |
| | | ATCTCTGAGACTCTCCTGTGCAGCCTCTAAAAGCATC |
| | | TTAAGTTTCGCTTACATGCGCTGGTACCGCCAGGCTC |
| | | CAGGGAAGCAGCGCGAGTTCGTCGCAAGTATTGCTAT |
| | | TGGAGGTGCCACAAGCTATACAGACTCCGTGAAGGG |
| | | CCGATTCACCATCTCCAGAGACAACGCCAAGAACACG |
| | | GTGTATCTGCAAATGAACAGCCTGAAACCTGAGGACA |
| | | CAGCCGTCTATTACTGTAGTGCACCAGCCGGACAGTA |
| | | TCGGGGCCAGGGGACCCTGGTCACCGTCTCCTCA |
| 459 | Nucleotide sequence | ATGAAAAAGACCGCTATCGCGATTGCAGTGGCACTGG |
| | encoding F0103500E03 | CTGGTTTGGCCACCGTGGCCCAGGCCGAGGTGCAATT |
| | (No tag) | GGTGGAGTCTGGGGGAGGATTGGTGCAGCCGGGGGG |
| | | CTCTCTGAGACTCTCCTGTGCAGCCTCTGGACGCACCT |
| | | TCTCGCGCTATCAGATGGGCTGGTTCCGCCAGGCTCC |
| | | AGGGAAGGAGCGTGAGTTTGTAGCATATATTAGCTGG |
| | | AGTGGTAGTACACGTTATGTTGACTCCGTGAAGGGCC |
| | | GATTCACCATCTCCAGAGACAACGCCAAGAACACGGT |
| | | GTATCTGCAAATGAACAGCCTGAAACCTGAGGACAC |
| | | GGCCGTTTATCACTGTGCAGCAGGGACGGCCGGCATA |
| | | ATATCTAGTAGGCCTGAAACTTATGACTCATGGGGCC |
| | | AGGGGACCCTGGTCACCGTCTCCTCA |
| 460 | Nucleotide sequence | ATGAAAAAGACCGCTATCGCGATTGCAGTGGCACTGG |
| | encoding F0103505D08 | CTGGTTTGGCCACCGTGGCCCAGGCCGAGGTGCAATT |
| | (No tag) | GGTGGAGTCTGGGGGAGGATTGGTGCAGGCTGGGGG |
| | | CTCTCTGAGACTCTCCTGTGTAACCTCTGGACGCACCT |
| | | CCGATTTGTCTACCATGAACTGGTTCCGCCAGGCTCC |
| | | AGGAAAGGAGCGTGAGTTTGTCGCACGCATCACTCGG |
| | | CGTGGTAGCACATACTATGCAGAGTCCGTGAAGGAAC |
| | | GATTCATCATCTCCAGAGACAACGCCAAGAACACGGT |
| | | GTATTTGCAAATGAACAGCCTGAAACCAGAGGACAC |
| | | GGCCAATTATTACTGTACTGCAGCCTCAGAAATGGGA |
| | | TATCACTACAGGGGCCAGGGGACCCTGGTCACCGTCT |
| | | CCTCA |
| 461 | Nucleotide sequence | ATGAAAAAGACCGCTATCGCGATTGCAGTGGCACTGG |
| | encoding F0103495F09 | CTGGTTTGGCCACCGTGGCCCAGGCCGAGGTGCAATT |
| | (No tag) | GGTGGAGTCTGGGGGAGGTTTGGTGCAGGCTGGAAG |
| | | CTCTCTGAGTCTCTCCTGTGCAGCCTCTGGACGCGCCT |
| | | TGAGTACATACGCCATGGGCTGGTTCCGCCAGGCTCC |
| | | AGGGAAGGAGCGTGAGTTTGTAGCACGTATTAGCCG |
| | | GAGCGGGATTACAACATACTATACAGACTCCGTGAAG |
| | | GGCCGATTCACCATCTCCAGAGACCGCGCCAAGGACA |
| | | CGGTGTATCTGCAAATGAACAGCCTGAAACCTGAGGA |
| | | CACGGCCATTTATTTGTGTGCAGCAGACGCCTCAACC |
| | | AATCCTGCTGGATACTACCTTCGGAATCGTTATGACT |
| | | ACTGGGGCCAGGGGACCCTGGTCACCGTCTCCTCA |
| 462 | 50GS linker | GGGGSGGGGSGGGGSGGGGSGGGGSGGGGSGGG |
| | | GSGGGGSGGGGSGGGGS |
| 463 | Nucleotide sequence | ATGAGATTTCCTTCAATTTTTACTGCTGTTTTATT |
| | encoding F010302375 | CGCAGCATCCTCCGCATTAGCTGCTCCAGTCAAC |
| | (No tag) | ACTACAACAGAAGATGAAACGGCACAAATTCCG |
| | | GCTGAAGCTGTCATCGGTTACTCAGATTTAGAAG |
| | | GGGATTTCGATGTTGCTGTTTTGCCATTTTCCAAC |
| | | AGCACAAATAACGGGTTATTGTTTATAAATACTA |
| | | CTATTGCCAGCATTGCTGCTAAAGAAGAAGGGGT |
| | | ATCTCTCGAAAAGAGAGACGTGCAATTGGTGGA |
| | | GTCTGGGGGAGGCTTGGTGCAGCCTGGGGGGTCT |
| | | CTGAGACTCTCCTGTGCAGCCTCTGGAAGCATCT |
| | | TCAATATCAACAGTATGGCCTGGTATCGCCGGGC |
| | | TCCAGGGAAGCAGCGCGAATTGGTCGCAAGTAG |
| | | CACCAATGGTGGTAGTACAAACTATGCAGACTCC |
| | | GTGAAGGGCCGATTCACCATCTCTAGAGACAAC |
| | | GCCAAACGGGTGTATCTGCAAATGAACAGCCTG |
| | | ACACCTGAGGACACGGCCGTCTATTATTGTCGTG |
| | | CACTGCTACAACCGTCGATTTATGACATTAGTCG |
| | | CACATATTGGGGCCAGGGGACCCTGGTCACGGTC |
| | | TCCTCCGGAGGTGGTGGCAGCGGTGGAGGTGGTT |
| | | CTGGGGGTGGCGGTAGTGGCGGTGGTGGCTCAG |
| | | GTGGCGGTGGGTCAGGCGGTGGTGGCAGTGGTG |
| | | GGGGTGGCAGCGGTGGCGGTGGATCTGGTGGAG |
| | | GTGGTTCTGGAGGTGGAGGATCCGAGGTGCAGTT |
| | | GGTGGAGTCTGGGGGAGGCTTGGTGCAGGCTGG |
| | | GGGGTCTCTGAGACTCTCCTGTGCTGCCTCTGGA |
| | | CGCGCCTTCAGTACCTTGGCCATGGGCTGGTTCC |
| | | GCCAGGCTCCAGGGAAGGAGCGTGAGTTTGTAG |
| | | CAGCTATTAGCCGGAATGGTAATAACTCAGCCAC |
| | | TGGAGACTCCCTGAAGGGCCGATTCACCATCTCC |
| | | AGAGACAGCACCAAGAGCACGGTTTTTCTGCAA |
| | | ATGAATACGCTGAAACCTGAGGACACGGCCGTA |
| | | TATTACTGTGCAGCCATCTCGACACCGTCCGCCA |
| | | GTCATCCATACGTTCGCAAGGAAAGTTATAGATA |
| | | CTGGGGCCAGGGTACCCAGGTCACCGTCTCCTCA |
| 464 | Nucleotide sequence | ATGAGATTTCCTTCAATTTTTACTGCTGTTTTATT |
| | encoding F010302377 | CGCAGCATCCTCCGCATTAGCTGCTCCAGTCAAC |
| | (No tag) | ACTACAACAGAAGATGAAACGGCACAAATTCCG |
| | | GCTGAAGCTGTCATCGGTTACTCAGATTTAGAAG |
| | | GGGATTTCGATGTTGCTGTTTTGCCATTTTCCAAC |
| | | AGCACAAATAACGGGTTATTGTTTATAAATACTA |
| | | CTATTGCCAGCATTGCTGCTAAAGAAGAAGGGGT |
| | | ATCTCTCGAAAAGAGAGACGTGCAATTGGTGGA |
| | | GTCTGGGGGAGGCTTGGTGCAGCCTGGGGGGTCT |
| | | CTGAGACTCTCCTGTGCAGCCTCTGGAAGCATCT |
| | | TCAATATCAACAGTATGGCCTGGTATCGCCGGGC |
| | | TCCAGGGAAGCAGCGCGAATTGGTCGCAAGTAG |
| | | CACCAATGGTGGTAGTACAAACTATGCAGACTCC |
| | | GTGAAGGGCCGATTCACCATCTCTAGAGACAAC |
| | | GCCAAACGGGTGTATCTGCAAATGAACAGCCTG |
| | | ACACCTGAGGACACGGCCGTCTATTATTGTCGTG |
| | | CACTGCTACAACCGTCGAT |
| | | TTATGACATTAGTCGCACATATTGGGGCCAGGGG |
| | | ACCCTGGTCACGGTCTCCTCCGGAGGTGGTGGCA |
| | | GCGGTGGAGGTGGTTCTGGGGGTGGCGGTAGTG |
| | | GCGGTGGTGGCTCAGGTGGCGGTGGGTCAGGCG |
| | | GTGGTGGCAGTGGTGGGGGTGGCAGCGGTGGCG |
| | | GTGGATCTGGTGGAGGTGGTTCTGGAGGTGGAG |
| | | GATCCGAGGTGCAGTTGGTGGAGTCTGGGGGAG |
| | | GCTTGGTGCAGGCTGGGGGATCTCTGAGACTCTC |
| | | CTGTGCAGCCTCTAAAAGCATCTTAAGTTTCGCT |
| | | TACATGCGCTGGTACCGCCAGGCTCCAGGGAAG |
| | | CAGCGCGAGTTCGTCGCAAGTATTGCTATTGGAG |
| | | GTGCCACAAGCTATACAGACTCCGTGAAGGGCC |
| | | GATTCACCATCTCCAGAGACAACGCCAAGAACA |
| | | CGGTGTATCTGCAAATGAACAGCCTGAAACCTGA |
| | | GGACACAGCCGTCTATTACTGTAGTGCACCAGCC |
| | | GGACAGTATCGGGGCCAGGGGACCCTGGTCACC |
| | | GTCTCCTCA |
| 465 | Nucleotide sequence | ATGAGATTTCCTTCAATTTTTACTGCTGTTTTATT |
| | encoding F010302378 | CGCAGCATCCTCCGCATTAGCTGCTCCAGTCAAC |
| | (No tag) | ACTACAACAGAAGATGAAACGGCACAAATTCCG |
| | | GCTGAAGCTGTCATCGGTTACTCAGATTTAGAAG |
| | | GGGATTTCGATGTTGCTGTTTTGCCATTTTCCAAC |
| | | AGCACAAATAACGGGTTATTGTTTATAAATACTA |
| | | CTATTGCCAGCATTGCTGCTAAAGAAGAAGGGGT |
| | | ATCTCTCGAAAAGAGAGACGTGCAATTGGTGGA |
| | | GTCTGGGGGAGGCTTGGTGCAGCCTGGGGGGTCT |
| | | CTGAGACTCTCCTGTGCAGCCTCTGGAAGCATCT |
| | | TCAATATCAACAGTATGGCCTGGTATCGCCGGGC |
| | | TCCAGGGAAGCAGCGCGAATTGGTCGCAAGTAG |
| | | CACCAATGGTGGTAGTACAAACTATGCAGACTCC |
| | | GTGAAGGGCCGATTCACCATCTCTAGAGACAAC |
| | | GCCAAACGGGTGTATCTGCAAATGAACAGCCTG |
| | | ACACCTGAGGACACGGCCGTCTATTATTGTCGTG |
| | | CACTGCTACAACCGTCGAT |
| | | TTATGACATTAGTCGCACATATTGGGGCCAGGGG |
| | | ACCCTGGTCACGGTCTCCTCCGGAGGTGGTGGCA |
| | | GCGGTGGAGGTGGTTCTGGGGGTGGCGGTAGTG |
| | | GCGGTGGTGGCTCAGGTGGCGGTGGGTCAGGCG |
| | | GTGGTGGCAGTGGTGGGGGTGGCAGCGGTGGCG |
| | | GTGGATCTGGTGGAGGTGGTTCTGGAGGTGGAG |
| | | GATCCGAGGTGCAGTTGGTGGAGTCTGGGGGAG |
| | | GTTTGGTGCAGGCTGGAAGCTCTCTGAGTCTCTC |
| | | CTGTGCAGCCTCTGGACGCGCCTTGAGTACATAC |
| | | GCCATGGGCTGGTTCCGCCAGGCTCCAGGGAAG |
| | | GAGCGTGAGTTTGTAGCACGTATTAGCCGGAGCG |
| | | GGATTACAACATACTATACAGACTCCGTGAAGG |
| | | GCCGATTCACCATCTCCAGAGACCGCGCCAAGG |
| | | ACACGGTGTATCTGCAAATGAACAGCCTGAAAC |
| | | CTGAGGACACGGCCATTTATTTGTGTGCAGCAGA |
| | | CGCCTCAACCAATCCTGCTGGATACTACCTTCGG |
| | | AATCGTTATGACTACTGGGGCCAGG |
| | | GGACCCTGGTCACCGTCTCCTCA |
| 466 | Nucleotide sequence | ATGAGATTTCCTTCAATTTTTACTGCTGTTTTATT |
| | encoding F010302379 | CGCAGCATCCTCCGCATTAGCTGCTCCAGTCAAC |
| | (No tag) | ACTACAACAGAAGATGAAACGGCACAAATTCCG |
| | | GCTGAAGCTGTCATCGGTTACTCAGATTTAGAAG |
| | | GGGATTTCGATGTTGCTGTTTTGCCATTTTCCAAC |
| | | AGCACAAATAACGGGTTATTGTTTATAAATACTA |
| | | CTATTGCCAGCATTGCTGCTAAAGAAGAAGGGGT |
| | | ATCTCTCGAAAAGAGAGACGTGCAATTGGTGGA |
| | | GTCTGGGGGAGGCTTGGTGCAGCCTGGGGGGTCT |
| | | CTGAGACTCTCCTGTGCAGCCTCTGGAAGCATCT |
| | | TCAATATCAACAGTATGGCCTGGTATCGCCGGGC |
| | | TCCAGGGAAGCAGCGCGAATTGGTCGCAAGTAG |
| | | CACCAATGGTGGTAGTACAAACTATGCAGACTCC |
| | | GTGAAGGGCCGATTCACCATCTCTAGAGACAAC |
| | | GCCAAACGGGTGTATCTGCAAATGAACAGCCTG |
| | | ACACCTGAGGACACGGCCGTCTATTATTGTCGTG |
| | | CACTGCTACAACCGTCGAT |
| | | TTATGACATTAGTCGCACATATTGGGGCCAGGGG |
| | | ACCCTGGTCACGGTCTCCTCCGGAGGTGGTGGCA |
| | | GCGGTGGAGGTGGTTCTGGGGGTGGCGGTAGTG |
| | | GCGGTGGTGGCTCAGGTGGCGGTGGGTCAGGCG |
| | | GTGGTGGCAGTGGTGGGGGTGGCAGCGGTGGCG |
| | | GTGGATCTGGTGGAGGTGGTTCTGGAGGTGGAG |
| | | GATCCGAGGTGCAGTTGGTGGAGTCTGGGGGAG |
| | | GATTGGTGCAGGCTGGGGGCTCTCTGAGACTCTC |
| | | CTGTGCAGCCTCTGGACGCACCTTCTCGAGGTAT |
| | | CAGATGGGCTGGTTCCGCCAGGCTCCAGGGAAG |
| | | GAGCGTGAGTTTGTAGCATATATTAGCTGGAGTG |
| | | GTAGTACACGTTATGTTGACTCCGTGAAGGGCCG |
| | | ATTCACCATCTCCAGAGACAACGCCAAGAACAC |
| | | GGTGTATCTGCAAATGAACAGCCTGAAACCTGA |
| | | GGACACGGCCGTTTATCACTGTGCAGCAGGGAC |
| | | GGCCGGCATAATATCTAGTAGGCCTGAAACTTAT |
| | | GACTCATGGGGCCAGGGGACCCAGG |
| | | TCACCGTCTCCTCA |
| 467 | Nucleotide sequence | ATGAGATTTCCTTCAATTTTTACTGCTGTTTTATT |
| | encoding | CGCAGCATCCTCCGCATTAGCTGCTCCAGTCAAC |
| | F010302380(No tag) | ACTACAACAGAAGATGAAACGGCACAAATTCCG |
| | | GCTGAAGCTGTCATCGGTTACTCAGATTTAGAAG |
| | | GGGATTTCGATGTTGCTGTTTTGCCATTTTCCAAC |
| | | AGCACAAATAACGGGTTATTGTTTATAAATACTA |
| | | CTATTGCCAGCATTGCTGCTAAAGAAGAAGGGGT |
| | | ATCTCTCGAAAAGAGAGACGTGCAATTGGTGGA |
| | | GTCTGGGGGAGGCTTGGTGCAGCCTGGGGGGTCT |
| | | CTGAGACTCTCCTGTGCAGCCTCTGGAAGCATCT |
| | | TCAATATCAACAGTATGGCCTGGTATCGCCGGGC |
| | | TCCAGGGAAGCAGCGCGAATTGGTCGCAAGTAG |
| | | CACCAATGGTGGTAGTACAAACTATGCAGACTCC |
| | | GTGAAGGGCCGATTCACCATCTCTAGAGACAAC |
| | | GCCAAACGGGTGTATCTGCAAATGAACAGCCTG |
| | | ACACCTGAGGACACGGCCGTCTATTATTGTCGTG |
| | | CACTGCTACAACCGTCGAT |
| | | TTATGACATTAGTCGCACATATTGGGGCCAGGGG |
| | | ACCCTGGTCACGGTCTCCTCCGGAGGTGGTGGCA |
| | | GCGGTGGAGGTGGTTCTGGGGGTGGCGGTAGTG |
| | | GCGGTGGTGGCTCAGGTGGCGGTGGGTCAGGCG |
| | | GTGGTGGCAGTGGTGGGGGTGGCAGCGGTGGCG |
| | | GTGGATCTGGTGGAGGTGGTTCTGGAGGTGGAG |
| | | GATCCGAGGTGCAGTTGGTGGAGTCTGGGGGAG |
| | | GATTGGTGCAGGCTGGGGGCTCTCTGAGACTCTC |
| | | CTGTGTAACCTCTGGACGCACCTCCGATTTGTCT |
| | | ACCATGAACTGGTTCCGCCAGGCTCCAGGAAAG |
| | | GAGCGTGAGTTTGTCGCACGCATCACTCGGCGTG |
| | | GTAGCACATACTATGCAGAGTCCGTGAAGGAAC |
| | | GATTCATCATCTCCAGAGACAACGCCAAGAACA |
| | | CGGTGTATTTGCAAATGAACAGCCTGAAACCAG |
| | | AGGACACGGCCAATTATTACTGTACTGCAGCCTC |
| | | AGAAATGGGATATCACTACAGGGGCCAGGGGAC |
| | | CCAGGTCACCGTCTCCTCA |
| 468 | Nucleotide sequence | ATGAGATTTCCTTCAATTTTTACTGCTGTTTTATT |
| | encoding F010302391 | CGCAGCATCCTCCGCATTAGCTGCTCCAGTCAAC |
| | (No tag) | ACTACAACAGAAGATGAAACGGCACAAATTCCG |
| | | GCTGAAGCTGTCATCGGTTACTCAGATTTAGAAG |
| | | GGGATTTCGATGTTGCTGTTTTGCCATTTTCCAAC |
| | | AGCACAAATAACGGGTTATTGTTTATAAATACTA |
| | | CTATTGCCAGCATTGCTGCTAAAGAAGAAGGGGT |
| | | ATCTCTCGAAAAGAGAGACGTGCAATTGGTGGA |
| | | GTCTGGGGGAGGCTTGGTGCAGCCTGGGGGGTCT |
| | | CTGAGACTCTCCTGTGCAGCCTCTGGAAGCATCT |
| | | TCAATATCAACAGTATGGCCTGGTATCGCCGGGC |
| | | TCCAGGGAAGCAGCGCGAATTGGTCGCAAGTAG |
| | | CACCAATGGTGGTAGTACAAACTATGCAGACTCC |
| | | GTGAAGGGCCGATTCACCATCTCTAGAGACAAC |
| | | GCCAAACGGGTGTATCTGCAAATGAACAGCCTG |
| | | ACACCTGAGGACACGGCCGTCTATTATTGTCGTG |
| | | CACTGCTACAACCGTCGAT |
| | | TTATGACATTAGTCGCACATATTGGGGCCAGGGG |
| | | ACCCTGGTCACGGTCTCCTCCGGAGGTGGTGGCA |
| | | GCGGTGGAGGTGGTTCTGGGGGTGGCGGTAGTG |
| | | GCGGTGGTGGCTCAGGTGGCGGTGGGTCAGGCG |
| | | GTGGTGGCAGTGGTGGGGGTGGCAGCGGTGGCG |
| | | GTGGATCTGGTGGAGGTGGTTCTGGAGGTGGAG |
| | | GATCCGAGGTGCAGTTGGTGGAGTCTGGGGGAG |
| | | GATTGGTGCAGGCTGGGGGCTCTCTGAGACTCTC |
| | | CTGTGCAGCCTCTGGACGCACCGCTAGTATCTAT |
| | | GCCATGGCCTGGTTCCGCCAGGCTCAGGGGAAG |
| | | GAGCGTGAATTTGTCGCAGTTATTACCCGGAGTG |
| | | GTGGAACGATCGTCTATGCAGACTCCGTGAAGG |
| | | GCCGATTCACCATCTCCAGAGACGACGCCAAGA |
| | | ACACTGTGTGGTTGCAAATGAGCGCTCTGAGACC |
| | | TGAGGACACAGCCGTATATTTCTGTAATGCGGTT |
| | | GCGGTCGAAGACGGGATGAACGTTATGAATTATT |
| | | GGGGCCAGGGGACCCTGGTCACCG |
| | | TCTCCTCA |
| 469 | Human IgG1 HC | ASTKGPSVFPLAPSSKSTSGGTAALGCLVKDYFPEP |
| | constant domain | VTVSWNSGALTSGVHTFPAVLQSSGLYSLSSVVTV |
| | | PSSSLGTQTYICNVNHKPSNTKVDKKVEPKSCDKT |
| | | HTCPPCPAPELLGGPSVFLFPPKPKDTLMISRTPEVT |
| | | CVVVDVSHEDPEVKFNWYVDGVEVHNAKTKPREE |
| | | QYNSTYRVVSVLTVLHQDWLNGKEYKCKVSNKA |
| | | LPAPIEKTISKAKGQPREPQVYTLPPSRDELTKNQVS |
| | | LTCLVKGFYPSDIAVEWESNGQPENNYKTTPPVLD |
| | | SDGSFFLYSKLTVDKSRWQQGNVFSCSVMHEALH |
| | | NHYTQKSLSLSPGK |
| 470 | Human IgG1 HC | ASTKGPSVFPLAPSSKSTSGGTAALGCLVKDYFPEP |
| | Constant domain | VTVSWNSGALTSGVHTFPAVLQSSGLYSLSSVVTV |
| | (L234A L235A D265S) | PSSSLGTQTYICNVNHKPSNTKVDKKVEPKSCDKT |
| | | HTCPPCPAPEAAGGPSVFLFPPKPKDTLMISRTPEVT |
| | | CVVVSVSHEDPEVKFNWYVDGVEVHNAKTKPREE |
| | | QYNSTYRVVSVLTVLHQDWLNGKEYKCKVSNKA |
| | | LPAPIEKTISKAKGQPREPQVYTLPPSRDELTKNQVS |
| | | LTCLVKGFYPSDIAVEWESNGQPENNYKTTPPVLD |
| | | SDGSFFLYSKLTVDKSRWQQGNVFSCSVMHEALH |
| | | NHYTQKSLSLSPGK |
| 471 | Human IgG1 HC | ASTKGPSVFPLAPSSKSTSGGTAALGCLVKDYFPEP |
| | Constant domain | VTVSWNSGALTSGVHTFPAVLQSSGLYSLSSVVTV |
| | (L234A L235A P329G) | PSSSLGTQTYICNVNHKPSNTKVDKKVEPKSCDKT |
| | | HTCPPCPAPEAAGGPSVFLFPPKPKDTLMISRTPEVT |
| | | CVVVSVSHEDPEVKFNWYVDGVEVHNAKTKPREE |
| | | QYNSTYRVVSVLTVLHQDWLNGKEYKCKVSNKA |
| | | LGAPIEKTISKAKGQPREPQVYTLPPSRDELTKNQV |
| | | SLTCLVKGFYPSDIAVEWESNGQPENNYKTTPPVL |
| | | DSDGSFFLYSKLTVDKSRWQQGNVFSCSVMHEAL |
| | | HNHYTQKSLSLSPGK |
| 472 | Human IgG1 HC | ASTKGPSVFPLAPSSKSTSGGTAALGCLVKDYFPEP |
| | Constant domain | VTVSWNSGALTSGVHTFPAVLQSSGLYSLSSVVTV |
| | (L235E) | PSSSLGTQTYICNVNHKPSNTKVDKKVEPKSCDKT |
| | | HTCPPCPAPELEGGPSVFLFPPKPKDTLMISRTPEVT |
| | | CVVVDVSHEDPEVKFNWYVDGVEVHNAKTKPREE |
| | | QYNSTYRVVSVLTVLHQDWLNGKEYKCKVSNKA |
| | | LPAPIEKTISKAKGQPREPQVYTLPPSRDELTKNQVS |
| | | LTCLVKGFYPSDIAVEWESNGQPENNYKTTPPVLD |
| | | SDGSFFLYSKLTVDKSRWQQGNVFSCSVMHEALH |
| | | NHYTQKSLSLSPGK |
| 473 | Human IgG1 HC | ASTKGPSVFPLAPSSKSTSGGTAALGCLVKDYFPEP |
| | Constant domain | VTVSWNSGALTSGVHTFPAVLQSSGLYSLSSVVTV |
| | (D265A) | PSSSLGTQTYICNVNHKPSNTKVDKKVEPKSCDKT |
| | | HTCPPCPAPELLGGPSVFLFPPKPKDTLMISRTPEVT |
| | | CVVVAVSHEDPEVKFNWYVDGVEVHNAKTKPREE |
| | | QYNSTYRVVSVLTVLHQDWLNGKEYKCKVSNKA |
| | | LPAPIEKTISKAKGQPREPQVYTLPPSRDELTKNQVS |
| | | LTCLVKGFYPSDIAVEWESNGQPENNYKTTPPVLD |
| | | SDGSFFLYSKLTVDKSRWQQGNVFSCSVMHEALH |
| | | NHYTQKSLSLSPGK |
| 474 | Human IgG1 HC | ASTKGPSVFPLAPSSKSTSGGTAALGCLVKDYFPEP |
| | Constant domain | VTVSWNSGALTSGVHTFPAVLQSSGLYSLSSVVTV |
| | (D265A N297G) | PSSSLGTQTYICNVNHKPSNTKVDKKVEPKSCDKT |
| | | HTCPPCPAPELLGGPSVFLFPPKPKDTLMISRTPEVT |
| | | CVVVAVSHEDPEVKFNWYVDGVEVHNAKTKPREE |
| | | QYGSTYRVVSVLTVLHQDWLNGKEYKCKVSNKA |
| | | LPAPIEKTISKAKGQPREPQVYTLPPSRDELTKNQVS |
| | | LTCLVKGFYPSDIAVEWESNGQPENNYKTTPPVLD |
| | | SDGSFFLYSKLTVDKSRWQQGNVFSCSVMHEALH |
| | | NHYTQKSLSLSPGK |
| 475 | Human IgG1 HC | ASTKGPSVFPLAPSSKSTSGGTAALGCLVKDYFPEP |
| | Constant domain | VTVSWNSGALTSGVHTFPAVLQSSGLYSLSSVVTV |
| | (E233A/L235A) | PSSSLGTQTYICNVNHKPSNTKVDKKVEPKSCDKT |
| | | HTCPPCPAPALAGGPSVFLFPPKPKDTLMISRTPEVT |
| | | CVVVDVSHEDPEVKFNWYVDGVEVHNAKTKPREE |
| | | QYNSTYRVVSVLTVLHQDWLNGKEYKCKVSNKA |
| | | LPAPIEKTISKAKGQPREPQVYTLPPSRDELTKNQVS |
| | | LTCLVKGFYPSDIAVEWESNGQPENNYKTTPPVLD |
| | | SDGSFFLYSKLTVDKSRWQQGNVFSCSVMHEALH |
| | | NHYTQKSLSLSPGK |
| 476 | Human IgG2 HC | ASTKGPSVFPLAPCSRSTSESTAALGCLVKDYFPEP |
| | Constant domain | VTVSWNSGALTSGVHTFPAVLQSSGLYSLSSVVTV |
| | | PSSNFGTQTYTCNVDHKPSNTKVDKTVERKCCVEC |
| | | PPCPAPPVAGPSVFLFPPKPKDTLMISRTPEVTCVVV |
| | | DVSHEDPEVQFNWYVDGVEVHNAKTKPREEQFNS |
| | | TFRVVSVLTVVHQDWLNGKEYKCKVSNKGLPAPI |
| | | EKTISKTKGQPREPQVYTLPPSREEMTKNQVSLTCL |
| | | VKGFYPSDISVEWESNGQPENNYKTTPPMLDSDGS |
| | | FFLYSKLTVDKSRWQQGNVFSCSVMHEALHNHYT |
| | | QKSLSLSPGK |
| 477 | Human IgG2 HC | ASTKGPSVFPLAPCSRSTSESTAALGCLVKDYFPEP |
| | Constant domain | VTVSWNSGALTSGVHTFPAVLQSSGLYSLSSVVTV |
| | (D265S) | PSSNFGTQTYTCNVDHKPSNTKVDKTVERKCCVEC |
| | | PPCPAPPVAGPSVFLFPPKPKDTLMISRTPEVTCVVV |
| | | SVSHEDPEVQFNWYVDGVEVHNAKTKPREEQFNS |
| | | TFRVVSVLTVVHQDWLNGKEYKCKVSNKGLPAPI |
| | | EKTISKTKGQPREPQVYTLPPSREEMTKNQVSLTCL |
| | | VKGFYPSDISVEWESNGQPENNYKTTPPMLDSDGS |
| | | FFLYSKLTVDKSRWQQGNVFSCSVMHEALHNHYT |
| | | QKSLSLSPGK |
| 478 | Human IgG2 HC | ASTKGPSVFPLAPCSRSTSESTAALGCLVKDYFPEP |
| | Constant domain | VTVSWNSGALTSGVHTFPAVLQSSGLYSLSSVVTV |
| | (P329G) | PSSNFGTQTYTCNVDHKPSNTKVDKTVERKCCVEC |
| | | PPCPAPPVAGPSVFLFPPKPKDTLMISRTPEVTCVVV |
| | | DVSHEDPEVQFNWYVDGVEVHNAKTKPREEQFNS |
| | | TFRVVSVLTVVHQDWLNGKEYKCKVSNKGLGAPI |
| | | EKTISKTKGQPREPQVYTLPPSREEMTKNQVSLTCL |
| | | VKGFYPSDISVEWESNGQPENNYKTTPPMLDSDGS |
| | | FFLYSKLTVDKSRWQQGNVFSCSVMHEALHNHYT |
| | | QKSLSLSPGK |
| 479 | Human IgG2 HC | ASTKGPSVFPLAPCSRSTSESTAALGCLVKDYFPEP |
| | Constant domain | VTVSWNSGALTSGVHTFPAVLQSSGLYSLSSVVTV |
| | (D265A) | PSSNFGTQTYTCNVDHKPSNTKVDKTVERKCCVEC |
| | | PPCPAPPVAGPSVFLFPPKPKDTLMISRTPEVTCVVV |
| | | AVSHEDPEVQFNWYVDGVEVHNAKTKPREEQFNS |
| | | TFRVVSVLTVVHQDWLNGKEYKCKVSNKGLPAPI |
| | | EKTISKTKGQPREPQVYTLPPSREEMTKNQVSLTCL |
| | | VKGFYPSDISVEWESNGQPENNYKTTPPMLDSDGS |
| | | FFLYSKLTVDKSRWQQGNVFSCSVMHEALHNHYT |
| | | QKSLSLSPGK |
| 480 | Human IgG2 HC | ASTKGPSVFPLAPCSRSTSESTAALGCLVKDYFPEP |
| | Constant domain | VTVSWNSGALTSGVHTFPAVLQSSGLYSLSSVVTV |
| | (D265A N297G) | PSSNFGTQTYTCNVDHKPSNTKVDKTVERKCCVEC |
| | | PPCPAPPVAGPSVFLFPPKPKDTLMISRTPEVTCVVV |
| | | AVSHEDPEVQFNWYVDGVEVHNAKTKPREEQFGS |
| | | TFRVVSVLTVVHQDWLNGKEYKCKVSNKGLPAPI |
| | | EKTISKTKGQPREPQVYTLPPSREEMTKNQVSLTCL |
| | | VKGFYPSDISVEWESNGQPENNYKTTPPMLDSDGS |
| | | FFLYSKLTVDKSRWQQGNVFSCSVMHEALHNHYT |
| | | QKSLSLSPGK |
| 481 | Human IgG2 HC | ASTKGPSVFPLAPCSRSTSESTAALGCLVKDYFPEP |
| | Constant domain | VTVSWNSGALTSGVHTFPAVLQSSGLYSLSSVVTV |
| | (V234A G237A P238S | PSSNFGTQTYTCNVDHKPSNTKVDKTVERKCCVEC |
| | H268A V309L A330S | PPCPAPPAAASSVFLFPPKPKDTLMISRTPEVTCVVV |
| | P331S X378S/A)(See | DVSAEDPEVQFNWYVDGVEVHNAKTKPREEQFNS |
| | IgGsigma SEQ ID | TFRVVSVLTVLHQDWLNGKEYKCKVSNKGLPSSIE |
| | No: 78 in | KTISKTKGQPREPQVYTLPPSREEMTKNQVSLTCLV |
| | WO2017079112) | KGFYPSDIXVEWESNGQPENNYKTTPPMLDSDGSF |
| | | FLYSKLTVDKSRWQQGNVFSCSVMHEALHNHYTQ |
| | | KSLSLSPGK |
| 482 | Human IgG4 HC | ASTKGPSVFPLAPCSRSTSESTAALGCLVKDYFPEP |
| | Constant domain | VTVSWNSGALTSGVHTFPAVLQSSGLYSLSSVVTV |
| | (S228P) | PSSSLGTKTYTCNVDHKPSNTKVDKRVESKYGPPC |
| | | PPCPAPEFLGGPSVFLFPPKPKDTLMISRTPEVTCVV |
| | | VDVSQEDPEVQFNWYVDGVEVHNAKTKPREEQFN |
| | | STYRVVSVLTVLHQDWLNGKEYKCKVSNKGLPSSI |
| | | EKTISKAKGQPREPQVYTLPPSQEEMTKNQVSLTCL |
| | | VKGFYPSDIAVEWESNGQPENNYKTTPPVLDSDGS |
| | | FFLYSRLTVDKSRWQEGNVFSCSVMHEALHNHYT |
| | | QKSLSLSLGK |
| 483 | Human IgG4 HC | ASTKGPSVFPLAPCSRSTSESTAALGCLVKDYFPEP |
| | Constant domain | VTVSWNSGALTSGVHTFPAVLQSSGLYSLSSVVTV |
| | (S228P P329G) | PSSSLGTKTYTCNVDHKPSNTKVDKRVESKYGPPC |
| | | PPCPAPEFLGGPSVFLFPPKPKDTLMISRTPEVTCVV |
| | | VDVSQEDPEVQFNWYVDGVEVHNAKTKPREEQFN |
| | | STYRVVSVLTVLHQDWLNGKEYKCKVSNKGLGSS |
| | | IEKTISKAKGQPREPQVYTLPPSQEEMTKNQVSLTC |
| | | LVKGFYPSDIAVEWESNGQPENNYKTTPPVLDSDG |
| | | SFFLYSRLTVDKSRWQEGNVFSCSVMHEALHNHY |
| | | TQKSLSLSLGK |
| 484 | Human IgG4 HC | ASTKGPSVFPLAPCSRSTSESTAALGCLVKDYFPEP |
| | Constant domain | VTVSWNSGALTSGVHTFPAVLQSSGLYSLSSVVTV |
| | (S228P D265A) | PSSSLGTKTYTCNVDHKPSNTKVDKRVESKYGPPC |
| | | PPCPAPEFLGGPSVFLFPPKPKDTLMISRTPEVTCVV |
| | | VAVSQEDPEVQFNWYVDGVEVHNAKTKPREEQFN |
| | | STYRVVSVLTVLHQDWLNGKEYKCKVSNKGLPSSI |
| | | EKTISKAKGQPREPQVYTLPPSQEEMTKNQVSLTCL |
| | | VKGFYPSDIAVEWESNGQPENNYKTTPPVLDSDGS |
| | | FFLYSRLTVDKSRWQEGNVFSCSVMHEALHNHYT |
| | | QKSLSLSLGK |
| 485 | Human IgG4 HC | ASTKGPSVFPLAPCSRSTSESTAALGCLVKDYFPEP |
| | Constant domain | VTVSWNSGALTSGVHTFPAVLQSSGLYSLSSVVTV |
| | (S228P D265A N297G) | PSSSLGTKTYTCNVDHKPSNTKVDKRVESKYGPPC |
| | | PPCPAPEFLGGPSVFLFPPKPKDTLMISRTPEVTCVV |
| | | VAVSQEDPEVQFNWYVDGVEVHNAKTKPREEQFG |
| | | STYRVVSVLTVLHQDWLNGKEYKCKVSNKGLPSSI |
| | | EKTISKAKGQPREPQVYTLPPSQEEMTKNQVSLTCL |
| | | VKGFYPSDIAVEWESNGQPENNYKTTPPVLDSDGS |
| | | FFLYSRLTVDKSRWQEGNVFSCSVMHEALHNHYT |
| | | QKSLSLSLGK |
| 486 | F010301657 | MKKTAIAIAVALAGLATVAQAEVQLVESGGGLVQPGGS |
| | | LRLSCAASVRPFSTSAMGWFRQAPEKEREAVAGILWNG |
| | | IVTYYADSVKGRFTISRDNAKNEVYLQMNKLKPEDTAV |
| | | YYCALDRAYQGRSFSAKEYEYWGQGTLVTVSS |
| 487 | F010301658 | MKKTAIAIAVALAGLATVAQAEVQLVESGGGLVQPGGS |
| | | LRLSCAASVRPFSTSAMGWFRQAPEKEREAVAAILWNG |
| | | IVTYYADSVKGRFTISRDNAKNEVYLQMNKLKPEDTAV |
| | | YYCALDRAYQGRSFSAKEYEYWGQGTLVTVSS |
| 488 | F010301659 | MKKTAIAIAVALAGLATVAQAEVQLVESGGGLVQPGGS |
| | | LRLSCAASVRPFSTSAMGWFRQAPEKEREAVAAILWNG |
| | | IVTYYADSVKGRFTISRDNAKNEVYLQMNKLKPEDTAV |
| | | YYCALDRAYGGRSFSAYEYEYWGQGTLVTVSS |
| 489 | F010301661 | MKKTAIAIAVALAGLATVAQAEVQLVESGGGLVQPGGS |
| | | LRLSCAASVRPFSTSAMGWFRQAPEKEREAVAAILWNG |
| | | IVTYYADSVKGRFTISRDNAKNEVYLQMNKLKPEDTAV |
| | | YYCALDRDYGGRSFSAKEYEYWGQGTLVTVSS |
| 490 | F010301662 | MKKTAIAIAVALAGLATVAQAEVQLVESGGGLVQPGGS |
| | | LRLSCAASVRPFSTSAMGWFRQAPEKEREAVAGILWNG |
| | | IVTYYADSVKGRFTISRDNAKNEVYLQMNKLKPEDTAV |
| | | YYCALDRAYQGRSFSAYEYEYWGQGTLVTVSSA |
| 491 | F010301663 | MKKTAIAIAVALAGLATVAQAEVQLVESGGGLVQPGGS |
| | | LRLSCAASVRPFSTSAMGWFRQAPEKEREAVAGILWNG |
| | | IVTYYADSVKGRFTISRDNAKNEVYLQMNKLKPEDTAV |
| | | YYCALDRAYGGRSFSAKEYEYWGQGTLVTVSS |
| 492 | F010301664 | MKKTAIAIAVALAGLATVAQAEVQLVESGGGLVQPGGS |
| | | LRLSCAASVRPFSTSAMGWFRQAPEKEREAVAGILWNG |
| | | IVTYYADSVKGRFTISRDNAKNEVYLQMNKLKPEDTAV |
| | | YYCALDRDYQGRSFSAKEYEYWGQGTLVTVSS |
| 493 | F010301665 | MKKTAIAIAVALAGLATVAQAEVQLVESGGGLVQPGGS |
| | | LRLSCAASVRPFSTSAMGWFRQAPEKEREAVAAILWNG |
| | | IVTYYADSVKGRFTISRDNAKNEVYLQMNKLKPEDTAV |
| | | YYCALDRAYGGRSFSAKEYEYWGQGTLVTV |
| 494 | F010301666 | MKKTAIAIAVALAGLATVAQAEVQLVESGGGLVQPGGS |
| | | LRLSCAASVRPFSTSAMGWFRQAPEKEREAVAAILWNG |
| | | IVTYYADSVKGRFTISRDNAKNEVYLQMNKLKPEDTAV |
| | | YYCALDRDYQGRSFSAKEYEYWGQGTLVTVSS |
| 495 | F010301867 | EVQLVESGGGLVQPGGSLRLSCATTSRQFIRDVFTG |
| | | WYRRVPGKERELVARIYNGGNTNYADFAKGRFSIS |
| | | RDNAKKMVTLRMSNLKPEDTGVYYCLFSGTINTG |
| | | REYRSGDYWGQGTLVTVSS |
| 496 | F010301878 | EVQLVESGGGLVQPGGSLRLSCATTSRAFIRDVFTG |
| | | WYRRVPGKERELVARIYNEGNTNYADFAKGRFSIS |
| | | RDNAKKMVTLRMSNLKPEDTGVYYCLFSGTINTG |
| | | REYRSGDYWGQGTLVTVSS |
| 497 | F010301879 | EVQLVESGGGLVQPGGSLRLSCATTSRAFIRDVFTG |
| | | WYRRVPGKERELVARIYNQGNTNYADFAKGRFSIS |
| | | RDNAKKMVTLRMSNLKPEDTGVYYCLFSGTINTG |
| | | REYRSGDYWGQGTLVTVSS |
| 498 | F010301880 | EVQLVESGGGLVQPGGSLRLSCATTSRAFIRDVFTG |
| | | WYRRVPGKERELVARIYNSGNTNYADFAKGRFSIS |
| | | RDNAKKMVTLRMSNLKPEDTGVYYCLFSGTINTG |
| | | REYRSGDYWGQGTLVTVSS |
| 499 | F010301881 | EVQLVESGGGLVQPGGSLRLSCATTSRAFIRDVFTG |
| | | WYRRVPGKERELVARIYNWGNTNYADFAKGRFSI |
| | | SRDNAKKMVTLRMSNLKPEDTGVYYCLFSGTINTG |
| | | REYRSGDYWGQGTLVTVSS |
| 500 | F010301882 | EVQLVESGGGLVQPGGSLRLSCATTSRAFVRDVFT |
| | | GWYRRVPGKERELVARIYNGGNTNYADFAKGRFSI |
| | | SRDNAKKMVTLRMSNLKPEDTGVYYCLFSGTINTG |
| | | REYRSGDYWGQGTLVTVSS |
| 501 | F010301883 | EVQLVESGGGLVQPGGSLRLSCATTSRAFIRDVFTG |
| | | WYRRVPGKERELVARVYNGGNTNYADFAKGRFSI |
| | | SRDNAKKMVTLRMSNLKPEDTGVYYCLFSGTINTG |
| | | REYRSGDYWGQGTLVTVSS |
| 502 | F010301884 | EVQLVESGGGLVQPGGSLRLSCATTSRAFIRDVFTG |
| | | WYRRVPGKERELVARIYAGGNTNYADFAKGRFSIS |
| | | RDNAKKMVTLRMSNLKPEDTGVYYCLFSGTINTG |
| | | REYRSGDYWGQGTLVTVSS |
| 503 | F010301885 | EVQLVESGGGLVQPGGSLRLSCATTSRAFIRDVFTG |
| | | WYRRVPGKERELVARIYEGGNTNYADFAKGRFSIS |
| | | RDNAKKMVTLRMSNLKPEDTGVYYCLFSGTINTG |
| | | REYRSGDYWGQGTLVTVSS |
| 504 | F010301886 | EVQLVESGGGLVQPGGSLRLSCATTSRAFIRDVFTG |
| | | WYRRVPGKERELVARIYNGGNTQYADFAKGRFSIS |
| | | RDNAKKMVTLRMSNLKPEDTGVYYCLFSGTINTG |
| | | REYRSGDYWGQGTLVTVSS |
| 505 | F010301887 | EVQLVESGGGLVQPGGSLRLSCATTSRAFIQDVFTG |
| | | WYRRVPGKERELVARIYNGGNTNYADFAKGRFSIS |
| | | RDNAKKMVTLRMSNLKPEDTGVYYCLFSGTINTG |
| | | REYRSGDYWGQGTLVTVSS |
| 506 | F010301888 | EVQLVESGGGLVQPGGSLRLSCATTHRAFIRDVFT |
| | | GWYRRVPGKERELVARIYNGGNTNYADFAKGRFSI |
| | | SRDNAKKMVTLRMSNLKPEDTGVYYCLFSGTINTG |
| | | REYRSGDYWGQGTLVTVSS |
| 507 | F010301889 | EVQLVESGGGLVQPGGSLRLSCATTSRAFIRDVFTG |
| | | WYRRVPGKERELVARIYNGGNTNYADFAKGRFSIS |
| | | RDNAKKMVTLRMSNLKPEDTGVYYCLFAGTINTG |
| | | REYRSGDYWGQGTLVTVSS |
| 508 | F010301890 | EVQLVESGGGLVQPGGSLRLSCATTSRAFIRDVFVG |
| | | WYRRVPGKERELVARIYNGGNTNYADFAKGRFSIS |
| | | RDNAKKMVTLRMSNLKPEDTGVYYCLFSGTINTG |
| | | REYRSGDYWGQGTLVTVSS |
| 509 | F010301891 | EVQLVESGGGLVQPGGSLRLSCATTSRAFIRDVFTG |
| | | WYRRVPGKERELVARIYNGGNVNYADFAKGRFSIS |
| | | RDNAKKMVTLRMSNLKPEDTGVYYCLFSGTINTG |
| | | REYRSGDYWGQGTLVTVSS |
| 510 | F010300534 | EVQLVESGGGLVQPGGSLRLSCAASGMLFNANTQ |
| | | GWYRQAPGKQRELVAFIFSGGYVNYVDSVKGRFTI |
| | | SRDNAKRTMYLQMNSLKPEDSAIYYCSLSRYLGQG |
| | | TLVTVSS |
| 511 | F010300535 | EVQLVESGGGLVQPGGSLRLSCAASGMLFNANTQ |
| | | GWYRQAPGKQRELVAFIFWGGYTNYVDSVKGRFT |
| | | ISRDNAKRTMYLQMNSLKPEDSAIYYCSLSRYLGQ |
| | | GTLVTVSS |
| 512 | F010300536 | EVQLVESGGGLVQPGGSLRLSCAASGMLFNANTQ |
| | | GWYRQAPGKQRELVAFIFSGGYTTYVDSVKGRFTI |
| | | SRDNAKRTMYLQMNSLKPEDSAIYYCSLSRYLGQG |
| | | TLVTVSS |
| 513 | F010301055 | EVQLVESGGGLVQPGGSLRLSCAASGMLFNANTQ |
| | | GWYRQAPGKQRELVAFIFWGGYVNYVDSVKGRFT |
| | | ISRDNAKRTMYLQMNSLKPEDSAIYYCSLSRYLGQ |
| | | GTLVTVSS |
| 514 | F010301059 | EVQLVESGGGLVQPGGSLRLSCAASGMLFNANTQ |
| | | GWYRQAPGKQRELVAFIFSGGYVNYNDSVKGRFTI |
| | | SRDNAKRTMYLQMNSLKPEDSAIYYCALSRYQGQ |
| | | GTLVTVSS |
| 515 | F010301080 | EVQLVESGGGLVQPGGSLRLSCAASGMLFNANTQ |
| | | GWYRQAPGKQRELVAFIFWGGYVTYNDSVKGRFT |
| | | ISRDNAKRTMYLQMNSLKPEDSAIYYCSLSRYLGQ |
| | | GTLVTVSS |
| 516 | F010301090 | EVQLVESGGGLVQPGGSLRLSCAASGMLFNANTQ |
| | | GWYRQAPGKQRELVAFIFSGGWTTYNDSVKGRFTI |
| | | SRDNAKRTMYLQMNSLKPEDSAIYYCSLSRYQGQ |
| | | GTLVTVSS |
| 517 | F010301099 | EVQLVESGGGLVQPGGSLRLSCAASGMLFNANTQ |
| | | GWYRQAPGKQRELVAFIFSGGWVTYVDSVKGRFTI |
| | | SRDNAKRTMYLQMNSLKPEDSAIYYCSLSRYLGQG |
| | | TLVTVSS |
| 518 | F010301111 | EVQLVESGGGLVQPGGSLRLSCAASGMLFNANTQ |
| | | GWYRQAPGKQRELVAFIFSGGYVNYNDSVKGRFTI |
| | | SRDNAKRTMYLQMNSLKPEDSAIYYCALSRYLGQ |
| | | GTLVTVSS |
| 519 | F010301113 | EVQLVESGGGLVQPGGSLRLSCAASGMLFNRNTQ |
| | | GWYRQAPGKQRELVAFIFSGGYTNYNDSVKGRFTI |
| | | SRDNAKRTMYLQMNSLKPEDSAIYYCSLSVYQGQ |
| | | GTLVTVSS |
| 520 | F010301126 | EVQLVESGGGLVQPGGSLRLSCAASGMLFNRNTQ |
| | | GWYRQAPGKQRELVAFIFSGGYVTYNDSVKGRFTI |
| | | SRDNAKRTMYLQMNSLKPEDSAIYYCSLSRYLGQG |
| | | TLVTVSS |
| 521 | F010301129 | EVQLVESGGGLVQPGGSLRLSCAASGMLFNANTQ |
| | | GWYRQAPGKQRELVAFIFSGGWTNYNDSVKGRFTI |
| | | SRDNAKRTMYLQMNSLKPEDSAIYYCALSRYQGQ |
| | | GTLVTVSS |
| 522 | F010301138 | EVQLVESGGGLVQPGGSLRLSCAASGMLFYANTQ |
| | | GWYRQAPGKQRELVAFIFSGGYTNYNDSVKGRFTI |
| | | SRDNAKRTMYLQMNSLKPEDSAIYYCALSRYQGQ |
| | | GTLVTVSS |
| 523 | F010301139 | EVQLVESGGGLVQPGGSLRLSCAASGMLFNRNTQ |
| | | GWYRQAPGKQRELVAFWFSGGYVNYNDSVKGRF |
| | | TISRDNAKRTMYLQMNSLKPEDSAIYYCSLSRYQG |
| | | QGTLVTVSS |
| 524 | F010301162 | EVQLVESGGGLVQPGGSLRLSCAASGMLFNRNTQ |
| | | GWYRQAPGKQRELVAFIFSGGWTNYNDSVKGRFTI |
| | | SRDNAKRTMYLQMNSLKPEDSAIYYCSLSRYQGQ |
| | | GTLVTVSS |
| 525 | F010301175 | EVQLVESGGGLVQPGGSLRLSCAASGMLFNRNTQ |
| | | GWYRQAPGKQRELVAFIFSGGYTTYVDSVKGRFTI |
| | | SRDNAKRTMYLQMNSLKPEDSAIYYCSLSRYLGQG |
| | | TLVTVSS |
| 526 | F010301188 | EVQLVESGGGLVQPGGSLRLSCAASGMLFNRNTQ |
| | | GWYRQAPGKQRELVAFIFSGGYTNYNDSVKGRFTI |
| | | SRDNAKRTMYLQMNSLKPEDSAIYYCSLSRYQGQ |
| | | GTLVTVSS |
| 527 | F010301191 | EVQLVESGGGLVQPGGSLRLSCAASGMLFNRNTQ |
| | | GWYRQAPGKQRELVAFIFSGGWTNYNDSVKGRFTI |
| | | SRDNAKRTMYLQMNSLKPEDSAIYYCALSVYQGQ |
| | | GTLVTVSS |
| 528 | F010301232 | EVQLVESGGGLVQPGGSLRLSCAASGMLFNRNTQ |
| | | GWYRQAPGKQRELVAFIFSGGYTTYVDSVKGRFTI |
| | | SRDNAKRTMYLQMNSLKPEDSAIYYCALSRYQGQ |
| | | GTLVTVSS |
| 529 | F010301458 | EVQLVESGGGLVQPGGSLRLSCAASGMLFNRNTQ |
| | | GWYRQAPGKQRELVAFIFSGGWTNYNDSVKGRFTI |
| | | SRDNAKRTMYLQMNSLKPEDSAIYYCALSRYQGQ |
| | | GTLVTVSS |
| 530 | F010301463 | EVQLVESGGGLVQPGGSLRLSCAASGMLFNRNTQ |
| | | GWYRQAPGKQRELVAFIFSGGYTNYNDSVKGRFTI |
| | | SRDNAKRTMYLQMNSLKPEDSAIYYCALSRYQGQ |
| | | GTLVTVSS |
| 531 | F010301301 | EVQLVESGGGLVQAGGSLRLSCDASGRILRTGYMR |
| | | WHRQGAGKQREFVARITDDSATDYADSVKGRFTIS |
| | | RDNAKNTVYLQMNNLNPEDTAVYYCEALVTASVR |
| | | GGSIHSGTYWGRGTLVTVSS |
| 532 | F010301304 | EVQLVESGGGLVQAGGSLRLSCDASGRILRWGYM |
| | | RWHRQGAGKQREFVARITDDSATDYADSVKGRFTI |
| | | SRDNAKNTVYLQMNNLNPEDTAVYYCEALVTASV |
| | | RGGSIHSGTYWGRGTLVTVSS |
| 533 | F010301309 | EVQLVESGGGLVQAGGSLRLSCDASGRIVRIGYMR |
| | | WHRQGAGKQREFVARITDDSATDYADSVKGRFTIS |
| | | RDNAKNTVYLQMNNLNPEDTAVYYCEALVTASVR |
| | | GGSIHSGTYWGRGTLVTVSS |
| 534 | F010301313 | EVQLVESGGGLVQAGGSLRLSCDASGRILRIGYMK |
| | | WHRQGAGKQREFVARITDDSATDYADSVKGRFTIS |
| | | RDNAKNTVYLQMNNLNPEDTAVYYCEALVTASVR |
| | | GGSIHSGTYWGRGTLVTVSS |
| 535 | F010301314 | EVQLVESGGGLVQAGGSLRLSCAASGRILRIGYMR |
| | | WHRQGAGKQREFVARITDDSATDYADSVKGRFTIS |
| | | RDNAKNTVYLQMNNLNPEDTAVYYCEALVTASVR |
| | | GGSIHSGTYWGRGTLVTVSS |
| 536 | F010301328 | EVQLVESGGGLVQAGGSLRLSCDASGRILRIGYMR |
| | | WHRQGAGKQREFVARITDDSAVDYADSVKGRFTIS |
| | | RDNAKNTVYLQMNNLNPEDTAVYYCEALVTASVR |
| | | GGSIHSGTYWGRGTLVTVSS |
| 537 | F010301335 | EVQLVESGGGLVQAGGSLRLSCDASGRILRIGYMR |
| | | WHRQGAGKQREFVAVITDDSATDYADSVKGRFTIS |
| | | RDNAKNTVYLQMNNLNPEDTAVYYCEALVTASVR |
| | | GGSIHSGTYWGRGTLVTVSS |
| 538 | F010301344 | EVQLVESGGGLVQAGGSLRLSCDASGRILRIGYMR |
| | | WHRQGAGKQREFVARITDGSATDYADSVKGRFTIS |
| | | RDNAKNTVYLQMNNLNPEDTAVYYCEALVTASVR |
| | | GGSIHSGTYWGRGTLVTVSS |
| 539 | F010301346 | EVQLVESGGGLVQAGGSLRLSCDASGRILRIGYMR |
| | | WHRQGAGKQREFVARITDDSATGYADSVKGRFTIS |
| | | RDNAKNTVYLQMNNLNPEDTAVYYCEALVTASVR |
| | | GGSIHSGTYWGRGTLVTVSS |
| 540 | F010301350 | EVQLVESGGGLVQAGGSLRLSCDASGRILRIGYMR |
| | | WHRQGAGKQREFVARITDDSATVYADSVKGRFTIS |
| | | RDNAKNTVYLQMNNLNPEDTAVYYCEALVTASVR |
| | | GGSIHSGTYWGRGTLVTVSS |
| 541 | F010301360 | EVQLVESGGGLVQAGGSLRLSCDASGRILRIGYMR |
| | | WHRQGAGKQREFVARITDDSTTDYADSVKGRFTIS |
| | | RDNAKNTVYLQMNNLNPEDTAVYYCEALVTASVR |
| | | GGSIHSGTYWGRGTLVTVSS |
| 542 | F010301367 | EVQLVESGGGLVQAGGSLRLSCDASGRILRIGYMR |
| | | WHRQGAGKQREFVARITGDSATDYADSVKGRFTIS |
| | | RDNAKNTVYLQMNNLNPEDTAVYYCEALVTASVR |
| | | GGSIHSGTYWGRGTLVTVSS |
| 543 | F010301372 | EVQLVESGGGLVQAGGSLRLSCDASGRILRIGYMR |
| | | WHRQGAGKQREFVARITDDSATDYADSVKGRFTIS |
| | | RDNAKNTVYLQMNNLNPEDTAVYYCEALVTASVR |
| | | GGGIHSGTYWGRGTLVTVSS |
| 544 | F010301387 | EVQLVESGGGLVQAGGSLRLSCDASGRILRIGYMR |
| | | WHRQGAGKQREFVARITDDSATDYADSVKGRFTIS |
| | | RDNAKNTVYLQMNNLNPEDTAVYYCEALVTASAR |
| | | GGSIHSGTYWGRGTLVTVSS |
| 545 | F010301409 | EVQLVESGGGLVQAGGSLRLSCDASGRILRIGYMR |
| | | WHRQGAGKQREFVARITDDSATDYADSVKGRFTIS |
| | | RDNAKNTVYLQMNNLNPEDTAVYYCEALVTASVR |
| | | GGSIVSGTYWGRGTLVTVSS |
| 546 | F010301416 | EVQLVESGGGLVQAGGSLRLSCDASGRILRIGYMR |
| | | WHRQGAGKQREFVARITDDSATDYADSVKGRFTIS |
| | | RDNAKNTVYLQMNNLNPEDTAVYYCEALVTASVR |
| | | GGSIHSGQYWGRGTLVTVSS |
| 547 | F010301418 | EVQLVESGGGLVQAGGSLRLSCDASGRILRIGYMR |
| | | WHRQGAGKQREFVARITDDSATDYADSVKGRFTIS |
| | | RDNAKNTVYLQMNNLNPEDTAVYYCEALVTASVR |
| | | GGSIHSGTWWGRGTLVTVSS |
| 548 | F010301425 | EVQLVESGGGLVQAGGSLRLSCDASGRILRIGYMR |
| | | WHRQGAGKQREFVARITDDSATDYADSVKGRFTIS |
| | | RDNAKNTVYLQMNNLNPEDTAVYYCEALVTASVR |
| | | VGSIHSGTYWGRGTLVTVSS |
| 549 | F010301440 | EVQLVESGGGLVQAGGSLRLSCDASGRILRIGYMR |
| | | WHRQGAGKQREFVARITDDSATDYADSVKGRFTIS |
| | | RDNAKNTVYLQMNNLNPEDTAVYYCEALVTASVR |
| | | GGSIHSTTYWGRGTLVTVSS |
| 550 | F010301445 | EVQLVESGGGLVQAGGSLRLSCDASGRILRIGYMR |
| | | WHRQGAGKQREFVARITDDSATDYADSVKGRFTIS |
| | | RDNAKNTVYLQMNNLNPEDTAVYYCEALVTASVR |
| | | GGYIHSGTYWGRGTLVTVSS |
| 551 | F010301557 | EVQLVESGGGLVQAGGSLRLSCAASGRILRIGYMR |
| | | WHRQGAGKQREFVARITGGSATDYADSVKGRFTIS |
| | | RDNAKNTVYLQMNNLNPEDTAVYYCEALVTASVR |
| | | GGSIHSGTYWGRGTLVTVSS |
| 552 | F010301558 | EVQLVESGGGLVQAGGSLRLSCAASGRILRIGYMR |
| | | WHRQGAGKQREFVARITGDSATGYADSVKGRFTIS |
| | | RDNAKNTVYLQMNNLNPEDTAVYYCEALVTASVR |
| | | GGSIHSGTYWGRGTLVTVSS |
| 553 | F010301559 | EVQLVESGGGLVQAGGSLRLSCAASGRILRIGYMR |
| | | WHRQGAGKQREFVARITDGSATGYADSVKGRFTIS |
| | | RDNAKNTVYLQMNNLNPEDTAVYYCEALVTASVR |
| | | GGSIHSGTYWGRGTLVTVSS |
| 554 | F010301560 | EVQLVESGGGLVQAGGSLRLSCDASGRILRIGYMR |
| | | WHRQGAGKQREFVARITGGSATGYADSVKGRFTIS |
| | | RDNAKNTVYLQMNNLNPEDTAVYYCEALVTASVR |
| | | GGSIHSGTYWGRGTLVTVSS |
| 555 | F010301561 | EVQLVESGGGLVQAGGSLRLSCAASGRILRIGYMR |
| | | WHRQGAGKQREFVARITGDSATDYADSVKGRFTIS |
| | | RDNAKNTVYLQMNNLNPEDTAVYYCEALVTASVR |
| | | GGSIHSGTYWGRGTLVTVSS |
| 556 | F010301562 | EVQLVESGGGLVQAGGSLRLSCAASGRILRIGYMR |
| | | WHRQGAGKQREFVARITDGSATDYADSVKGRFTIS |
| | | RDNAKNTVYLQMNNLNPEDTAVYYCEALVTASVR |
| | | GGSIHSGTYWGRGTLVTVSS |
| 557 | F010301564 | EVQLVESGGGLVQAGGSLRLSCDASGRILRIGYMR |
| | | WHRQGAGKQREFVARITGGSATDYADSVKGRFTIS |
| | | RDNAKNTVYLQMNNLNPEDTAVYYCEALVTASVR |
| | | GGSIHSGTYWGRGTLVTVSS |
| 558 | F010301565 | EVQLVESGGGLVQAGGSLRLSCDASGRILRIGYMR |
| | | WHRQGAGKQREFVARITGDSATGYADSVKGRFTIS |
| | | RDNAKNTVYLQMNNLNPEDTAVYYCEALVTASVR |
| | | GGSIHSGTYWGRGTLVTVSS |
| 559 | F010301566 | EVQLVESGGGLVQAGGSLRLSCDASGRILRIGYMR |
| | | WHRQGAGKQREFVARITDGSATGYADSVKGRFTIS |
| | | RDNAKNTVYLQMNNLNPEDTAVYYCEALVTASVR |
| | | GGSIHSGTYWGRGTLVTVSS |
| 560 | F010301567 | EVQLVESGGGLVQAGGSLRLSCAASVRPYSTSAMG |
| | | WFRQAPEKEREAVAGILWNGIVTYYADSVKGRFTI |
| | | SRDNAKNEVYLQMNKLKPEDTAVYYCALDRDYG |
| | | GRSFSAYEYEYWGQGTLVTVSS |
| 561 | F010301568 | EVQLVESGGGLVQAGGSLRLSCAASVRPFSTSAMT |
| | | WFRQAPEKEREAVAGILWNGIVTYYADSVKGRFTI |
| | | SRDNAKNEVYLQMNKLKPEDTAVYYCALDRDYG |
| | | GRSFSAYEYEYWGQGTLVTVSS |
| 562 | F010301574 | EVQLVESGGGLVQAGGSLRLSCAASVRPFSTSAMA |
| | | WFRQAPEKEREAVAGILWNGIVTYYADSVKGRFTI |
| | | SRDNAKNEVYLQMNKLKPEDTAVYYCALDRDYG |
| | | GRSFSAYEYEYWGQGTLVTVSS |
| 563 | F010301578 | EVQLVESGGGLVQAGGSLRLSCAASVRPFGTSAMG |
| | | WFRQAPEKEREAVAGILWNGIVTYYADSVKGRFTI |
| | | SRDNAKNEVYLQMNKLKPEDTAVYYCALDRDYG |
| | | GRSFSAYEYEYWGQGTLVTVSS |
| 564 | F010301579 | EVQLVESGGGLVQAGGSLRLSCAASVKPFSTSAMG |
| | | WFRQAPEKEREAVAGILWNGIVTYYADSVKGRFTI |
| | | SRDNAKNEVYLQMNKLKPEDTAVYYCALDRDYG |
| | | GRSFSAYEYEYWGQGTLVTVSS |
| 565 | F010301580 | EVQLVESGGGLVQAGGSLRLSCAASVTPFSTSAMG |
| | | WFRQAPEKEREAVAGILWNGIVTYYADSVKGRFTI |
| | | SRDNAKNEVYLQMNKLKPEDTAVYYCALDRDYG |
| | | GRSFSAYEYEYWGQGTLVTVSS |
| 566 | F010301584 | EVQLVESGGGLVQAGGSLRLSCAASVRPFSTSAMG |
| | | WFRQAPEKEREAVAGILTNGIVTYYADSVKGRFTIS |
| | | RDNAKNEVYLQMNKLKPEDTAVYYCALDRDYGG |
| | | RSFSAYEYEYWGQGTLVTVSS |
| 567 | F010301585 | EVQLVESGGGLVQAGGSLRLSCAASVRPFSTSAMG |
| | | WFRQAPEKEREAVAGILWNGIPTYYADSVKGRFTI |
| | | SRDNAKNEVYLQMNKLKPEDTAVYYCALDRDYG |
| | | GRSFSAYEYEYWGQGTLVTVSS |
| 568 | F010301586 | EVQLVESGGGLVQAGGSLRLSCAASVRPFSTSAMG |
| | | WFRQAPEKEREAVAGILANGIVTYYADSVKGRFTI |
| | | SRDNAKNEVYLQMNKLKPEDTAVYYCALDRDYG |
| | | GRSFSAYEYEYWGQGTLVTVSS |
| 569 | F010301589 | EVQLVESGGGLVQAGGSLRLSCAASVRPFSTSAMG |
| | | WFRQAPEKEREAVAGILWNGPVTYYADSVKGRFTI |
| | | SRDNAKNEVYLQMNKLKPEDTAVYYCALDRDYG |
| | | GRSFSAYEYEYWGQGTLVTVSS |
| 570 | F010301591 | EVQLVESGGGLVQAGGSLRLSCAASVRPFSTSAMG |
| | | WFRQAPEKEREAVAGILWNGIVTYYADSVKGRFTI |
| | | SRDNAKNEVYLQMNKLKPEDTAVYYCALDRDYK |
| | | GRSFSAYEYEYWGQGTLVTVSS |
| 571 | F010301592 | EVQLVESGGGLVQAGGSLRLSCAASVRPFSTSAMG |
| | | WFRQAPEKEREAVAGILWNGIVTYYADSVKGRFTI |
| | | SRDNAKNEVYLQMNKLKPEDTAVYYCALDRDYG |
| | | GSSFSAYEYEYWGQGTLVTVSS |
| 572 | F010301593 | EVQLVESGGGLVQAGGSLRLSCAASVRPFSTSAMG |
| | | WFRQAPEKEREAVAGILWNGIVTYYADSVKGRFTI |
| | | SRDNAKNEVYLQMNKLKPEDTAVYYCALDKDYG |
| | | GRSFSAYEYEYWGQGTLVTVSS |
| 573 | F010301594 | EVQLVESGGGLVQAGGSLRLSCAASVRPFSTSAMG |
| | | WFRQAPEKEREAVAGILWNGIVTYYADSVKGRFTI |
| | | SRDNAKNEVYLQMNKLKPEDTAVYYCALDRDYG |
| | | GKSFSAYEYEYWGQGTLVTVSS |
| 574 | F010301595 | EVQLVESGGGLVQAGGSLRLSCAASVRPFSTSAMG |
| | | WFRQAPEKEREAVAGILWNGIVTYYADSVKGRFTI |
| | | SRDNAKNEVYLQMNKLKPEDTAVYYCALDRAYG |
| | | GRSFSAYEYEYWGQGTLVTVSS |
| 575 | F010301596 | EVQLVESGGGLVQAGGSLRLSCAASVRPFSTSAMG |
| | | WFRQAPEKEREAVAGILWNGIVTYYADSVKGRFTI |
| | | SRDNAKNEVYLQMNKLKPEDTAVYYCALDRDYA |
| | | GRSFSAYEYEYWGQGTLVTVSS |
| 576 | F010301598 | EVQLVESGGGLVQAGGSLRLSCAASVRPFSTSAMG |
| | | WFRQAPEKEREAVAGILWNGIVTYYADSVKGRFTI |
| | | SRDNAKNEVYLQMNKLKPEDTAVYYCALDRDYQ |
| | | GRSFSAYEYEYWGQGTLVTVSS |
| 577 | F010301604 | EVQLVESGGGLVQAGGSLRLSCAASVRPFSTSAMG |
| | | WFRQAPEKEREAVAGILWNGIVTYYADSVKGRFTI |
| | | SRDNAKNEVYLQMNKLKPEDTAVYYCALDRDYG |
| | | GQSFSAYEYEYWGQGTLVTVSS |
| 578 | F010301606 | EVQLVESGGGLVQAGGSLRLSCAASVRPFSTSAMG |
| | | WFRQAPEKEREAVAGILWNGIVTYYADSVKGRFTI |
| | | SRDNAKNEVYLQMNKLKPEDTAVYYCALDRDYG |
| | | GRSFSAKEYEYWGQGTLVTVSS |
| 579 | F010301607 | EVQLVESGGGLVQAGGSLRLSCAASVRPFSTSAMG |
| | | WFRQAPEKEREAVAGILWNGIVTYYADSVKGRFTI |
| | | SRDNAKNEVYLQMNKLKPEDTAVYYCALDRDYG |
| | | GRSFSAAEYEYWGQGTLVTVSS |
| 580 | F010301609 | EVQLVESGGGLVQAGGSLRLSCAASVRPFSTSAMG |
| | | WFRQAPEKEREAVAGILWNGIVTYYADSVKGRFTI |
| | | SRDNAKNEVYLQMNKLKPEDTAVYYCALDRDYG |
| | | GRSFSAQEYEYWGQGTLVTVSS |
| 581 | F010301612 | EVQLVESGGGLVQAGGSLRLSCAASVRPFSTSAMG |
| | | WFRQAPEKEREAVAGILWNGIVTYYADSVKGRFTI |
| | | SRDNAKNEVYLQMNKLKPEDTAVYYCALDRDYG |
| | | GRSFSATEYEYWGQGTLVTVSS |
| 582 | F010301617 | EVQLVESGGGLVQAGGSLRLSCAASVRPFSTSAMG |
| | | WFRQAPEKEREAVAGILWNGIVTYYADSVKGRFTI |
| | | SRDNAKNEVYLQMNKLKPEDTAVYYCALDRDYG |
| | | GRSQSAYEYEYWGQGTLVTVSS |
| 583 | F010301618 | EVQLVESGGGLVQAGGSLRLSCAASVRPFSTSAMG |
| | | WFRQAPEKEREAVAGILWNGIVTYYADSVKGRFTI |
| | | SRDNAKNEVYLQMNKLKPEDTAVYYCALDRDYG |
| | | GRSFSAYEYEHWGQGTLVTVSS |
| 584 | F010301619 | EVQLVESGGGLVQAGGSLRLSCAASVRPFSTSAMG |
| | | WFRQAPEKEREAVAGILWNGIVTYYADSVKGRFTI |
| | | SRDNAKNEVYLQMNKLKPEDTAVYYCALDRDYG |
| | | GRSKSAYEYEYWGQGTLVTVSS |
| 585 | F010301621 | EVQLVESGGGLVQAGGSLRLSCAASVRPFSTSAMG |
| | | WFRQAPEKEREAVAGILWNGIVTYYADSVKGRFTI |
| | | SRDNAKNEVYLQMNKLKPEDTAVYYCALDRDYG |
| | | GRSFSAGEYEYWGQGTLVTVSS |
| 586 | F010301622 | EVQLVESGGGLVQAGGSLRLSCAASVRPFSTSAMG |
| | | WFRQAPEKEREAVAGILWNGIVTYYADSVKGRFTI |
| | | SRDNAKNEVYLQMNKLKPEDTAVYYCALDRDYG |
| | | GRSFSADEYEYWGQGTLVTVSS |
| 587 | F010301627 | EVQLVESGGGLVQAGGSLRLSCAASVRPFSTSAMG |
| | | WFRQAPEKEREAVAAILWNGIVTYYADSVKGRFTI |
| | | SRDNAKNEVYLQMNKLKPEDTAVYYCALDRDYG |
| | | GRSFSAYEYEYWGQGTLVTVSS |
| 588 | F010301629 | EVQLVESGGGLVQAGGSLRLSCAASVRPFSTSAMG |
| | | WFRQAPEKEREAVASILWNGIVTYYADSVKGRFTI |
| | | SRDNAKNEVYLQMNKLKPEDTAVYYCALDRDYG |
| | | GRSFSAYEYEYWGQGTLVTVSS |
| 589 | F010300316 | EVQLVESGGGLVQPGGSLRLSCAASGSIFNINSMA |
| | | WYRRAPGKQRELVASSTNGGSWNYADSVKGRFTI |
| | | SRDNAKRVYLQMNSLTPEDTAVYYCNALLQPSIYD |
| | | ISRTYWGQGTLVTVSS |
| 590 | F010300468 | EVQLVESGGGLVQPGGSLRLSCAASGSIFNINSMA |
| | | WYRRAPGKQRELVASSTNGGSTNYADSVKGRFTIS |
| | | RDNAKRVYLQMNSLTPEDTAVYYCRALLQPSIYDI |
| | | SRTYWGQGTLVTVSS |
| 591 | F010300477 | EVQLVESGGGLVQPGGSLRLSCAASGSIFNINSMA |
| | | WYRRAPGKQRELVASSTNGGSTNYADSVKGRFTIS |
| | | RDNAKRVYLQMNSLTPEDTAVYYCNWLLQPSIYDI |
| | | SRTYWGQGTLVTVSS |
| 592 | F010300631 | EVQLVESGGGLVQPGGSLRLSCAASGPVFNINSMA |
| | | WYRRAPGKQRELVAYSTPGGSTNYADSVKGRFTIS |
| | | RDNAKRVYLQMNSLTPEDTAVYYCRALLQPSIYDI |
| | | SRTYWGQGTLVTVSS |
| 593 | F010300659 | EVQLVESGGGLVQPGGSLRLSCAASGPVFNINSMA |
| | | WYRRAPGKQRELVAYSTPGWDWNYADSVKGRFTI |
| | | SRDNAKRVYLQMNSLTPEDTAVYYCRWLLQPSIY |
| | | DISRTYWGQGTLVTVSS |
| 594 | F010300684 | EVQLVESGGGLVQPGGSLRLSCAASGPVFNWNSM |
| | | AWYRRAPGKQRELVASSTPGGSTNYADSVKGRFTI |
| | | SRDNAKRVYLQMNSLTPEDTAVYYCRALLQPSIYD |
| | | ISRIYWGQGTLVTVSS |
| 595 | F010300796 | EVQLVESGGGLVQPGGSLRLSCAASGPVFNINRMA |
| | | WYRRAPGKQRELVAYSTPGGDTNYADSVKGRFTIS |
| | | RDNAKRVYLQMNSLTPEDTAVYYCNALLQPSIYDI |
| | | SRTYWGQGTLVTVSS |
| 596 | F010300880 | EVQLVESGGGLVQPGGSLRLSCAASGPVFNINRMA |
| | | WYRRAPGKQRELVASSTPGGDTNYADSVKGRFTIS |
| | | RDNAKRVYLQMNSLTPEDTAVYYCRWLLQPSIYDI |
| | | SRTYWGQGTLVTVSS |
| 597 | F010300900 | EVQLVESGGGLVQPGGSLRLSCAASGPVFNINRMA |
| | | WYRRAPGKQRELVASSTPGGDTNYADSVKGRFTIS |
| | | RDNAKRVYLQMNSLTPEDTAVYYCRWLLQPSIYDI |
| | | SRIYWGQGTLVTVSS |
| 598 | F010300948 | EVQLVESGGGLVQPGGSLRLSCAASGPVFNINRMA |
| | | WYRRAPGKQRELVASSTPGGSTNYADSVKGRFTIS |
| | | RDNAKRVYLQMNSLTPEDTAVYYCRWLLQPSIYDI |
| | | SRIYWGQGTLVTVSS |
| 599 | F010300990 | EVQLVESGGGLVQPGGSLRLSCAASGPVFNINRMA |
| | | WYRRAPGKQRELVAYSTPGGSTNYADSVKGRFTIS |
| | | RDNAKRVYLQMNSLTPEDTAVYYCNALLQPSIYDI |
| | | SRIYWGQGTLVTVSS |
| 600 | F010301000 | EVQLVESGGGLVQPGGSLRLSCAASGPVFNINRMA |
| | | WYRRAPGKQRELVAYSTPGGDTNYADSVKGRFTIS |
| | | RDNAKRVYLQMNSLTPEDTAVYYCNALLQPSIYDI |
| | | SRIYWGQGTLVTVSS |
| 601 | F010301459 | EVQLVESGGGLVQPGGSLRLSCAASGPVFNINRMA |
| | | WYRRAPGKQRELVASSTPGGDTNYADSVKGRFTIS |
| | | RDNAKRVYLQMNSLTPEDTAVYYCRALLQPSIYDI |
| | | SRTYWGQGTLVTVSS |
| 602 | F010301460 | EVQLVESGGGLVQPGGSLRLSCAASGPVFNINRMA |
| | | WYRRAPGKQRELVAYSTPGGSTNYADSVKGRFTIS |
| | | RDNAKRVYLQMNSLTPEDTAVYYCRALLQPSIYDI |
| | | SRTYWGQGTLVTVSS |
| 603 | F010301462 | EVQLVESGGGLVQPGGSLRLSCAASGPVFNINRMA |
| | | WYRRAPGKQRELVAYSTPGGDTNYADSVKGRFTIS |
| | | RDNAKRVYLQMNSLTPEDTAVYYCRALLQPSIYDI |
| | | SRTYWGQGTLVTVSS |

[0436] While the present invention is described herein with reference to illustrated embodiments, it should be understood that the invention is not limited hereto. Those having ordinary skill in the art and access to the teachings herein will recognize additional modifications and embodiments within the scope thereof. Therefore, the present invention is limited only by the claims attached herein.

The application's sequence listing, which the Patent Office published only in electronic form, follows.

SEQUENCE LISTING (603 sequences)

SEQ ID NO: 1 - protein, 1977 aa, Homo sapiens
MAMLPPPGPQSFVHFTKQSLALIEQRIAERKSKEPKEEKKDDDEEAPKPSSDLEAGKQLPFIYGDIPPGMVSEPLEDLDPYYADKKTFIVLNKGKTIFRFNATPALYMLSPFSPLRRISIKILVHSLFSMLIMCTILTNCIFMTMNNPPDWTKNVEYTFTGIYTFESLVKILARGFCVGEFTFLRDPWNWLDFVVIVFAYLTEFVNLGNVSALRTFRVLRALKTISVIPGLKTIVGALIQSVKKLSDVMILTVFCLSVFALIGLQLFMGNLKHKCFRNSLENNETLESIMNTLESEEDFRKYFYYLEGSKDALLCGFSTDSGQCPEGYTCVKIGRNPDYGYTSFDTFSWAFLALFRLMTQDYWENLYQQTLRAAGKTYMIFFVVVIFLGSFYLINLILAVVAMAYEEQNQANIEEAKQKELEFQQMLDRLKKEQEEAEAIAAAAAEYTSIRRSRIMGLSESSSETSKLSSKSAKERRNRRKKKNQKKLSSGEEKGDAEKLSKSESEDSIRRKSFHLGVEGHRRAHEKRLSTPNQSPLSIRGSLFSARRSSRTSLFSFKGRGRDIGSETEFADDEHSIFGDNESRRGSLFVPHRPQERRSSNISQASRSPPMLPVNGKMHSAVDCNGVVSLVDGRSALMLPNGQLLPEGTTNQIHKKRRCSSYLLSEDMLNDPNLRQRAMSRASILTNTVEELEESRQKCPPWWYRFAHKFLIWNCSPYWIKFKKCIYFIVMDPFVDLAITICIVLNTLFMAMEHHPMTEEFKNVLAIGNLVFTGIFAAEMVLKLIAMDPYEYFQVGWNIFDSLIVTLSLVELFLADVEGLSVLRSFRLLRVFKLAKSWPTLNMLIKIIGNSVGALGNLTLVLAIIVFIFAVVGMQLFGKSYKECVCKINDDCTLPRWHMNDFFHSFLIVFRVLCGEWIETMWDCMEVAGQAMCLIVYMMVMVIGNLVVLNLFLALLLSSFSSDNLTAIEEDPDANNLQIAVTRIKKGINYVKQTLREFILKAFSKKPKISREIRQAEDLNTKKENYISNHTLAEMSKGHNFLKEKDKISGFGSSVDKHLMEDSDGQSFIHNPSLTVTVPIAPGESDLENMNAEELSSDSDSEYSKVRLNRSSSSECSTVDNPLPGEGEEAEAEPMNSDEPEACFTDGCVRRFSCCQVNIESGKGKIWWNIRKTCYKIVEHSWFESFIVLMILLSSGALAFEDIYIERKKTIKIILEYADKIFTYIFILEMLLKWIAYGYKTYFTNAWCWLDFLIVDVSLVTLVANTLGYSDLGPIKSLRTLRALRPLRALSRFEGMRVVVNALIGAIPSIMNVLLVCLIFWLIFSIMGVNLFAGKFYECINTTDGSRFPASQVPNRSECFALMNVSQNVRWKNLKVNFDNVGLGYLSLLQVATFKGWTIIMYAAVDSVNVDKQPKYEYSLYMYIYFVVFIIFGSFFTLNLFIGVIIDNFNQQKKKLGGQDIFMTEEQKKYYNAMKKLGSKKPQKPIPRPGNKIQGCIFDLVTNQAFDISIMVLICLNMVTMMVEKEGQSQHMTEVLYWINVVFIILFTGECVLKLISLRHYYFTVGWNIFDFVVVIISIVGMFLADLIETYFVSPTLFRVIRLARIGRILRLVKGAKGIRTLLFALMMSLPALFNIGLLLFLVMFIYAIFGMSNFAYVKKEDGINDMFNFETFGNSMICLFQITTSAGWDGLLAPILNSKPPDCDPKKVHPGSSVEGDCGNPSVGIFYFVSYIIISFLVVVNMYIAVILENFSVATEESTEPLSEDDFEMFYEVWEKFDPDATQFIEFSKLSDFAAALDPPLLIAKPNKVQLIAMDLPMVSGDRIHCLDILFAFTKRVLGESGEMDSLRSQMEERFMSANPSKVSYEPITTTLKRKQEDVSATVIQRAYRRYRLRQNVKNISSIYIKDGDRDDDLLNKKDMAFDNVNENSSPEKTDATSSTTSPPSYDSVTKPDKEKYEQDRTEKEDKGKDSKESKK

SEQ ID NO: 2 - protein, 1977 aa, Macaca mulatta; identical to SEQ ID NO: 1

SEQ ID NO: 3 - protein, 2694 aa, Artificial Sequence
  huNav1.7-beta1-beta2-beta3 viral P2A
MAMLPPPGPQSFVHFTKQSLALIEQRIAERKSKEPKEEKKDDDEEAPKPSSDLEAGKQLPFIYGDIPPGMVSEPLEDLDPYYADKKTFIVLNKGKTIFRFNATPALYMLSPFSPLRRISIKILVHSLFSMLIMCTILTNCIFMTMNNPPDWTKNVEYTFTGIYTFESLVKILARGFCVGEFTFLRDPWNWLDFVVIVFAYLTEFVNLGNVSALRTFRVLRALKTISVIPGLKTIVGALIQSVKKLSDVMILTVFCLSVFALIGLQLFMGNLKHKCFRNSLENNETLESIMNTLESEEDFRKYFYYLEGSKDALLCGFSTDSGQCPEGYTCVKIGRNPDYGYTSFDTFSWAFLALFRLMTQDYWENLYQQTLRAAGKTYMIFFVVVIFLGSFYLINLILAVVAMAYEEQNQANIEEAKQKELEFQQMLDRLKKEQEEAEAIAAAAAEYTSIRRSRIMGLSESSSETSKLSSKSAKERRNRRKKKNQKKLSSGEEKGDAEKLSKSESEDSIRRKSFHLGVEGHRRAHEKRLSTPNQSPLSIRGSLFSARRSSRTSLFSFKGRGRDIGSETEFADDEHSIFGDNESRRGSLFVPHRPQERRSSNISQASRSPPMLPVNGKMHSAVDCNGVVSLVDGRSALMLPNGQLLPEGTTNQIHKKRRCSSYLLSEDMLNDPNLRQRAMSRASILTNTVEELEESRQKCPPWWYRFAHKFLIWNCSPYWIKFKKCIYFIVMDPFVDLAITICIVLNTLFMAMEHHPMTEEFKNVLAIGNLVFTGIFAAEMVLKLIAMDPYEYFQVGWNIFDSLIVTLSLVELFLADVEGLSVLRSFRLLRVFKLAKSWPTLNMLIKIIGNSVGALGNLTLVLAIIVFIFAVVGMQLFGKSYKECVCKINDDCTLPRWHMNDFFHSFLIVFRVLCGEWIETMWDCMEVAGQAMCLIVYMMVMVIGNLVVLNLFLALLLSSFSSDNLTAIEEDPDANNLQIAVTRIKKGINYVKQTLREFILKAFSKKPKISREIRQAEDLNTKKENYISNHTLAEMSKGHNFLKEKDKISGFGSSVDKHLMEDSDGQSFIHNPSLTVTVPIAPGESDLENMNAEELSSDSDSEYSKVRLNRSSSSECSTVDNPLPGEGEEAEAEPMNSDEPEACFTDGCVRRFSCCQVNIESGKGKIWWNIRKTCYKIVEHSWFESFIVLMILLSSGALAFEDIYIERKKTIKIILEYADKIFTYIFILEMLLKWIAYGYKTYFTNAWCWLDFLIVDVSLVTLVANTLGYSDLGPIKSLRTLRALRPLRALSRFEGMRVVVNALIGAIPSIMNVLLVCLIFWLIFSIMGVNLFAGKFYECINTTDGSRFPASQVPNRSECFALMNVSQNVRWKNLKVNFDNVGLGYLSLLQVATFKGWTIIMYAAVDSVNVDKQPKYEYSLYMYIYFVVFIIFGSFFTLNLFIGVIIDNFNQQKKKLGGQDIFMTEEQKKYYNAMKKLGSKKPQKPIPRPGNKIQGCIFDLVTNQAFDISIMVLICLNMVTMMVEKEGQSQHMTEVLYWINVVFIILFTGECVLKLISLRHYYFTVGWNIFDFVVVIISIVGMFLADLIETYFVSPTLFRVIRLARIGRILRLVKGAKGIRTLLFALMMSLPALFNIGLLLFLVMFIYAIFGMSNFAYVKKEDGINDMFNFETFGNSMICLFQITTSAGWDGLLAPILNSKPPDCDPKKVHPGSSVEGDCGNPSVGIFYFVSYIIISFLVVVNMYIAVILENFSVATEESTEPLSEDDFEMFYEVWEKFDPDATQFIEFSKLSDFAAALDPPLLIAKPNKVQLIAMDLPMVSGDRIHCLDILFAFTKRVLGESGEMDSLRSQMEERFMSANPSKVSYEPITTTLKRKQEDVSATVIQRAYRRYRLRQNVKNISSIYIKDGDRDDDLLNKKDMAFDNVNENSSPEKTDATSSTTSPPSYDSVTKPDKEKYEQDRTEKEDKGKDSKESKKSGRGSGATNFSLLKQAGDVEENPGPMGRLLALVVGAALVSSACGGCVEVDSETEAVYGMTFKILCISCKRRSETNAETFTEWTFRQKGTEEFVKILRYENEVLQLEEDERFEGRVVWNGSRGTKDLQDLSIFITNVTYNHSGDYECHVYRLLFFENYEHNTSVVKKIHIEVVDKANRDMASIVSEIMMYVLIVVLTIWLVAEMIYCYKKIAAATETAAQENASEYLAITSESKENCTGVQVAEGSGATNFSLLKQAGDVEENPGPMHRDAWLPRPAFSLTGLSLFFSLVPPGRSMEVTVPATLNVLNGSDARLPCTFNSCYTVNHKQFSLNWTYQECNNCSEEMFLQFRMKIINLKLERFQDRVEFSGNPSKYDVSVMLRNVQPEDEGIYNCYIMNPPDRHRGHGKIHLQVLMEEPPERDSTVAVIVGASVGGFLAVVILVLMVVKCVRRKKEQKLSTDDLKTEEEGKTDGEGNPDDGAKGSGATNFSLLKQAGDVEENPGPMPAFNRLFPLASLVLIYWVSVCFPVCVEVPSETEAVQGNPMKLRCISCMKREEVEATTVVEWFYRPEGGKDFLIYEYRNGHQEVESPFQGRLQWNGSKDLQDVSITVLNVTLNDSGLYTCNVSREFEFEAHRPFVKTTRLIPLRVTEEAGEDFTSVVSEIMMYILLVFLTLWLLIEMIYCYRKVSKAEEAAQENASDYLAIPSENKENSAVPVEE

SEQ ID NO: 4 - protein, 2694 aa, Artificial Sequence
  rhNav1.7-beta1-beta2-beta3 viral P2A
MAMLPPPGPQSFVHFTKQSLALIEQRIAERKSKEPKEEKKDDDEEAPKPSSDLEAGKQLPFIYGDIPPGMVSEPLEDLDPYYADKKTFIVLNKGKTIFRFNATPALYMLSPFSPLRRISIKILVHSLFSMLIMCTILTNCIFMTMSNPPDWTKNVEYTFTGIYTFESLVKILARGFCVGEFTFLRDPWNWLDFIVIVFAYLTEFVNLGNVSALRTFRVLRALKTISVIPGLKTIVGALIQSVKKLSDVMILTVFCLSVFALIGLQLFMGNLKHKCVQNSLVNNETLESIMNTLESEEDFRKYFYYLEGSKDALLCGFSTDSGQCPEGYTCMKIGRNPDYGYTSFDTFSWAFLALFRLMTQDYWENLYQQTLRAAGKTYMIFFVVVIFLGSFYLINLILAVVAMAYEEQNQANIEEAKQKELEFQQMLDRLKKEQEEAEAIAAAAAEYTSIRRSRIMGLSESSSETSKLSSKSAKERRNRRKKKNQKKLSSGEEKGDAEKLSKSDSEENIRRKSFHLGVEGHRRAHEKRLSTPSQSPLSIRGSLFSARRSSRTSLFSFKGRGRDIGSETEFADDEHSIFGDNESRRGSLFVPHRPQERRSSNISQASRSPPILPVNGKMHSAVDCNGVVSLVDGRSALMLPNGQLLPEGTTNQIHKKRRCSSYLLSEDMLNDPNLRQRAMSRASILTNTVEELEESRQKCPPWWYRFAHKFLIWNCSPYWIKFKKCIYFIVMDPFVDLAITICIVLNTLFMAMEHHPMTEEFKNVLAIGNLVFTGIFAAEMVLKLIAMDPYEYFQVGWNIFDSLIVTLSLVELFLADVEGLSVLRSFRLLRVFKLAKSWPTLNMLIKIIGNSVGALGNLTLVLAIIVFIFAVVGMQLFGKSYKECVCKINDDCTLPRWHMNDFFHSFLIVFRVLCGEWIETMWDCMEVAGQAMCLIVYMMVMVIGNLVVLNLFLALLLSSFSSDNLTAIEEDPDANNLQIAVTRIKKGINYVKQTLREFILKTFSKKPKISREIRQTEDLNTKKENYISNYTLAEMSKGHNFLKEKDKISGFGSCVDKYLMEDSDGQSFIHNPSLTVTVPIAPGESDLENMNTEELSSDSDSEYSKVRLNQSSSSECSTVDNPLPGEGEEAEAEPMNSDEPEACFTDGCVRRFSCCQVNIESGKGKIWWNIRKTCYKIVEHSWFESFIVLMILLSSGALAFEDIYIERKKTIKIILEYADKIFTYIFILEMLLKWIAYGYKTYFTNAWCWLDFLIVDVSLVTLVANTLGYSDLGPIKSLRTLRALRPLRALSRFEGMRVVVNALIGAIPSIMNVLLVCLIFWLIFSIMGVNLFAGKFYECINTTDGSRFPASQVPNRSECFALMNVSQNVRWKNLKVNFDNVGLGYLSLLQVATFKGWTIIMYAAVDSVNVDKQPKYEYSLYMYIYFVIFIIFGSFFTLNLFIGVIIDNFNQQKKKLGGQDIFMTEEQKKYYNAMKKLGSKKPQKPIPRPGNKIQGCIFDLVTNQAFDISIMVLICLNMVTMMVEKEGQSPYMTDVLYWINVVFIILFTGECVLKLISLRYYYFTIGWNIFDFVVVIISIVGMFLADLIETYFVSPTLFRVIRLARIGRILRLVKGAKGIRTLLFALMMSLPALFNIGLLLFLVMFIYAIFGMSNFAYVKKEDGINDMFNFETFGNSMICLFQITTSAGWDGLLAPILNSKPPDCDPKKVHPGSSVEGDCGNPSVGIFYFVSYIIISFLVVVNMYIAVILENFSVATEESTEPLSEDDFEMFYEVWEKFDPDATQFIEYNKLSDFAAALDPPLLIAKPNKVQLIAMDLPMVSGDRIHCLDILFAFTKRVLGESGEMDSLRSQMEERFMSANPSKVSYEPITTTLKRKQEDVSATVIQRAYRRYRLRQNVKNISSIYIKDGDRDDDLLNKKDMAFDNVNENSSPEKTDATSSTTSPPSYDSVTKPDKEKYEQDRTEKEDKGKDSKESKKSGRGSGATNFSLLKQAGDVEENPGPMGRLLALVVGAALVSSACGGCVEVDSETEAVYGMTFKILCISCKRRSETNAETFTEWTFRQKGTEEFVKILRYENEVLQLEEDERFEGRVVWNGSRGTKDLQDLSIFITNVTYNHSGDYECHVYRLLFFENYEHNTSVVKKIHIEVVDKANRDMASIVSEIMMYVLIVVLTIWLVAEMIYCYKKIAAATETAAQENASEYLAITSESKENCTGVQVAEGSGATNFSLLKQAGDVEENPGPMHRDAWLPRPAFSLTGLSLFFSLVPPGRSMEVTVPATLNVLNGSDARLPCTFNSCYTVNHKQFSLNWTYQECNNCSEEMFLQFRMKIINLKLERFQDRVEFSGNPSKYDVSVMLRNVQPEDEGIYNCYIMNPPDRHRGHGKIHLQVLMEEPPERDSTVAVIVGASVGGFLAVVILVLMVVKCVRRKKEQKLSTDDLKTEEEGKTDGEGNPDDGAKGSGATNFSLLKQAGDVEENPGPMPAFNRLFPLASLVLIYWVSVCFPVCVEVPSETEAVQGNPMKLRCISCMKREEVEATTVVEWFYRPEGGKDFLIYEYRNGHQEVESPFQGRLQWNGSKDLQDVSITVLNVTLNDSGLYTCNVSREFEFEAHRPFVKTTRLIPLRVTEEAGEDFTSVVSEIMMYILLVFLTLWLLIEMIYCYRKVSKAEEAAQENASDYLAIPSENKENSAVPVEE

SEQ ID NO: 5 - protein, 2730 aa, Artificial Sequence
  huNav1.7(F276V)-beta1-beta2-beta3 viral P2A
MAMLPPPGPQSFVHFTKQSLALIEQRIAERKSKEPKEEKKDDDEEAPKPSSDLEAGKQLPFIYGDIPPGMVSEPLEDLDPYYADKKTFIVLNKGKTIFRFNATPALYMLSPFSPLRRISIKILVHSLFSMLIMCTILTNCIFMTMNNPPDWTKNVEYTFTGIYTFESLVKILARGFCVGEFTFLRDPWNWLDFVVIVFAYLTEFVNLGNVSALRTFRVLRALKTISVIPGLKTIVGALIQSVKKLSDVMILTVFCLSVFALIGLQLFMGNLKHKCVRNSLENNETLESIMNTLESEEDFRKYFYYLEGSKDALLCGFSTDSGQCPEGYTCVKIGRNPDYGYTSFDTFSWAFLALFRLMTQDYWENLYQQTLRAAGKTYMIFFVVVIFLGSFYLINLILAVVAMAYEEQNQANIEEAKQKELEFQQMLDRLKKEQEEAEAIAAAAAEYTSIRRSRIMGLSESSSETSKLSSKSAKERRNRRKKKNQKKLSSGEEKGDAEKLSKSESEDSIRRKSFHLGVEGHRRAHEKRLSTPNQSPLSIRGSLFSARRSSRTSLFSFKGRGRDIGSETEFADDEHSIFGDNESRRGSLFVPHRPQERRSSNISQASRSPPMLPVNGKMHSAVDCNGVVSLVDGRSALMLPNGQLLPEGTTNQIHKKRRCSSYLLSEDMLNDPNLRQRAMSRASILTNTVEELEESRQKCPPWWYRFAHKFLIWNCSPYWIKFKKCIYFIVMDPFVDLAITICIVLNTLFMAMEHHPMTEEFKNVLAIGNLVFTGIFAAEMVLKLIAMDPYEYFQVGWNIFDSLIVTLSLVELFLADVEGLSVLRSFRLLRVFKLAKSWPTLNMLIKIIGNSVGALGNLTLVLAIIVFIFAVVGMQLFGKSYKECVCKINDDCTLPRWHMNDFFHSFLIVFRVLCGEWIETMWDCMEVAGQAMCLIVYMMVMVIGNLVVLNLFLALLLSSFSSDNLTAIEEDPDANNLQIAVTRIKKGINYVKQTLREFILKAFSKKPKISREIRQAEDLNTKKENYISNHTLAEMSKGHNFLKEKDKISGFGSSVDKHLMEDSDGQSFIHNPSLTVTVPIAPGESDLENMNAEELSSDSDSEYSKVRLNRSSSSECSTVDNPLPGEGEEAEAEPMNSDEPEACFTDGCVRRFSCCQVNIESGKGKIWWNIRKTCYKIVEHSWFESFIVLMILLSSGALAFEDIYIERKKTIKIILEYADKIFTYIFILEMLLKWIAYGYKTYFTNAWCWLDFLIVDVSLVTLVANTLGYSDLGPIKSLRTLRALRPLRALSRFEGMRVVVNALIGAIPSIMNVLLVCLIFWLIFSIMGVNLFAGKFYECINTTDGSRFPASQVPNRSECFALMNVSQNVRWKNLKVNFDNVGLGYLSLLQVATFKGWTIIMYAAVDSVNVDKQPKYEYSLYMYIYFVVFIIFGSFFTLNLFIGVIIDNFNQQKKKLGGQDIFMTEEQKKYYNAMKKLGSKKPQKPIPRPGNKIQGCIFDLVTNQAFDISIMVLICLNMVTMMVEKEGQSQHMTEVLYWINVVFIILFTGECVLKLISLRHYYFTVGWNIFDFVVVIISIVGMFLADLIETYFVSPTLFRVIRLARIGRILRLVKGAKGIRTLLFALMMSLPALFNIGLLLFLVMFIYAIFGMSNFAYVKKEDGINDMFNFETFGNSMICLFQITTSAGWDGLLAPILNSKPPDCDPKKVHPGSSVEGDCGNPSVGIFYFVSYIIISFLVVVNMYIAVILENFSVATEESTEPLSEDDFEMFYEVWEKFDPDATQFIEFSKLSDFAAALDPPLLIAKPNKVQLIAMDLPMVSGDRIHCLDILFAFTKRVLGESGEMDSLRSQMEERFMSANPSKVSYEPITTTLKRKQEDVSATVIQRAYRRYRLRQNVKNISSIYIKDGDRDDDLLNKKDMAFDNVNENSSPEKTDATSSTTSPPSYDSVTKPDKEKYEQDRTEKEDKGKDSKESKKENLYFQGDYKDHDGDYKDHDIDYKDDDDKHHHHHHHHHHGSGATNFSLLKQAGDVEENPGPMGRLLALVVGAALVSSACGGCVEVDSETEAVYGMTFKILCISCKRRSETNAETFTEWTFRQKGTEEFVKILRYENEVLQLEEDERFEGRVVWNGSRGTKDLQDLSIFITNVTYNHSGDYECHVYRLLFFENYEHNTSVVKKIHIEVVDKANRDMASIVSEIMMYVLIVVLTIWLVAEMIYCYKKIAAATETAAQENASEYLAITSESKENCTGVQVAEGSGATNFSLLKQAGDVEENPGPMHRDAWLPRPAFSLTGLSLFFSLVPPGRSMEVTVPATLNVLNGSDARLPCTFNSCYTVNHKQFSLNWTYQECNNCSEEMFLQFRMKIINLKLERFQDRVEFSGNPSKYDVSVMLRNVQPEDEGIYNCYIMNPPDRHRGHGKIHLQVLMEEPPERDSTVAVIVGASVGGFLAVVILVLMVVKCVRRKKEQKLSTDDLKTEEEGKTDGEGNPDDGAKGSGATNFSLLKQAGDVEENPGPMPAFNRLFPLASLVLIYWVSVCFPVCVEVPSETEAVQGNPMKLRCISCMKREEVEATTVVEWFYRPEGGKDFLIYEYRNGHQEVESPFQGRLQWNGSKDLQDVSITVLNVTLNDSGLYTCNVSREFEFEAHRPFVKTTRLIPLRVTEEAGEDFTSVVSEIMMYILLVFLTLWLLIEMIYCYRKVSKAEEAAQENASDYLAIPSENKENSAVPVEE

SEQ ID NO: 6 - protein, 2730 aa, Artificial Sequence
  huNav1.7(R277Q)-beta1-beta2-beta3 viral P2A
MAMLPPPGPQSFVHFTKQSLALIEQRIAERKSKEPKEEKKDDDEEAPKPSSDLEAGKQLPFIYGDIPPGMVSEPLEDLDPYYADKKTFIVLNKGKTIFRFNATPALYMLSPFSPLRRISIKILVHSLFSMLIMCTILTNCIFMTMNNPPDWTKNVEYTFTGIYTFESLVKILARGFCVGEFTFLRDPWNWLDFVVIVFAYLTEFVNLGNVSALRTFRVLRALKTISVIPGLKTIVGALIQSVKKLSDVMILTVFCLSVFALIGLQLFMGNLKHKCFQNSLENNETLESIMNTLESEEDFRKYFYYLEGSKDALLCGFSTDSGQCPEGYTCVKIGRNPDYGYTSFDTFSWAFLALFRLMTQDYWENLYQQTLRAAGKTYMIFFVVVIFLGSFYLINLILAVVAMAYEEQNQANIEEAKQKELEFQQMLDRLKKEQEEAEAIAAAAAEYTSIRRSRIMGLSESSSETSKLSSKSAKERRNRRKKKNQKKLSSGEEKGDAEKLSKSESEDSIRRKSFHLGVEGHRRAHEKRLSTPNQSPLSIRGSLFSARRSSRTSLFSFKGRGRDIGSETEFADDEHSIFGDNESRRGSLFVPHRPQERRSSNISQASRSPPMLPVNGKMHSAVDCNGVVSLVDGRSALMLPNGQLLPEGTTNQIHKKRRCSSYLLSEDMLNDPNLRQRAMSRASILTNTVEELEESRQKCPPWWYRFAHKFLIWNCSPYWIKFKKCIYFIVMDPFVDLAITICIVLNTLFMAMEHHPMTEEFKNVLAIGNLVFTGIFAAEMVLKLIAMDPYEYFQVGWNIFDSLIVTLSLVELFLADVEGLSVLRSFRLLRVFKLAKSWPTLNMLIKIIGNSVGALGNLTLVLAIIVFIFAVVGMQLFGKSYKECVCKINDDCTLPRWHMNDFFHSFLIVFRVLCGEWIETMWDCMEVAGQAMCLIVYMMVMVIGNLVVLNLFLALLLSSFSSDNLTAIEEDPDANNLQIAVTRIKKGINYVKQTLREFILKAFSKKPKISREIRQAEDLNTKKENYISNHTLAEMSKGHNFLKEKDKISGFGSSVDKHLMEDSDGQSFIHNPSLTVTVPIAPGESDLENMNAEELSSDSDSEYSKVRLNRSSSSECSTVDNPLPGEGEEAEAEPMNSDEPEACFTDGCVRRFSCCQVNIESGKGKIWWNIRKTCYKIVEHSWFESFIVLMILLSSGALAFEDIYIERKKTIKIILEYADKIFTYIFILEMLLKWIAYGYKTYFTNAWCWLDFLIVDVSLVTLVANTLGYSDLGPIKSLRTLRALRPLRALSRFEGMRVVVNALIGAIPSIMNVLLVCLIFWLIFSIMGVNLFAGKFYECINTTDGSRFPASQVPNRSECFALMNVSQNVRWKNLKVNFDNVGLGYLSLLQVATFKGWTIIMYAAVDSVNVDKQPKYEYSLYMYIYFVVFIIFGSFFTLNLFIGVIIDNFNQQKKKLGGQDIFMTEEQKKYYNAMKKLGSKKPQKPIPRPGNKIQGCIFDLVTNQAFDISIMVLICLNMVTMMVEKEGQSQHMTEVLYWINVVFIILFTGECVLKLISLRHYYFTVGWNIFDFVVVIISIVGMFLADLIETYFVSPTLFRVIRLARIGRILRLVKGAKGIRTLLFALMMSLPALFNIGLLLFLVMFIYAIFGMSNFAYVKKEDGINDMFNFETFGNSMICLFQITTSAGWDGLLAPILNSKPPDCDPKKVHPGSSVEGDCGNPSVGIFYFVSYIIISFLVVVNMYIAVILENFSVATEESTEPLSEDDFEMFYEVWEKFDPDATQFIEFSKLSDFAAALDPPLLIAKPNKVQLIAMDLPMVSGDRIHCLDILFAFTKRVLGESGEMDSLRSQMEERFMSANPSKVSYEPITTTLKRKQEDVSATVIQRAYRRYRLRQNVKNISSIYIKDGDRDDDLLNKKDMAFDNVNENSSPEKTDATSSTTSPPSYDSVTKPDKEKYEQDRTEKEDKGKDSKESKKENLYFQGDYKDHDGDYKDHDIDYKDDDDKHHHHHHHHHHGSGATNFSLLKQAGDVEENPGPMGRLLALVVGAALVSSACGGCVEVDSETEAVYGMTFKILCISCKRRSETNAETFTEWTFRQKGTEEFVKILRYENEVLQLEEDERFEGRVVWNGSRGTKDLQDLSIFITNVTYNHSGDYECHVYRLLFFENYEHNTSVVKKIHIEVVDKANRDMASIVSEIMMYVLIVVLTIWLVAEMIYCYKKIAAATETAAQENASEYLAITSESKENCTGVQVAEGSGATNFSLLKQAGDVEENPGPMHRDAWLPRPAFSLTGLSLFFSLVPPGRSMEVTVPATLNVLNGSDARLPCTFNSCYTVNHKQFSLNWTYQECNNCSEEMFLQFRMKIINLKLERFQDRVEFSGNPSKYDVSVMLRNVQPEDEGIYNCYIMNPPDRHRGHGKIHLQVLMEEPPERDSTVAVIVGASVGGFLAVVILVLMVVKCVRRKKEQKLSTDDLKTEEEGKTDGEGNPDDGAKGSGATNFSLLKQAGDVEENPGPMPAFNRLFPLASLVLIYWVSVCFPVCVEVPSETEAVQGNPMKLRCISCMKREEVEATTVVEWFYRPEGGKDFLIYEYRNGHQEVESPFQGRLQWNGSKDLQDVSITVLNVTLNDSGLYTCNVSREFEFEAHRPFVKTTRLIPLRVTEEAGEDFTSVVSEIMMYILLVFLTLWLLIEMIYCYRKVSKAEEAAQENASDYLAIPSENKENSAVPVEE

SEQ ID NO: 7 - protein, 2730 aa, Artificial Sequence
  huNav1.7(E281V)-beta1-beta2-beta3 viral P2A
MAMLPPPGPQSFVHFTKQSLALIEQRIAERKSKEPKEEKKDDDEEAPKPSSDLEAGKQLPFIYGDIPPGMVSEPLEDLDPYYADKKTFIVLNKGKTIFRFNATPALYMLSPFSPLRRISIKILVHSLFSMLIMCTILTNCIFMTMNNPPDWTKNVEYTFTGIYTFESLVKILARGFCVGEFTFLRDPWNWLDFVVIVFAYLTEFVNLGNVSALRTFRVLRALKTISVIPGLKTIVGALIQSVKKLSDVMILTVFCLSVFALIGLQLFMGNLKHKCFRNSLVNNETLESIMNTLESEEDFRKYFYYLEGSKDALLCGFSTDSGQCPEGYTCVKIGRNPDYGYTSFDTFSWAFLALFRLMTQDYWENLYQQTLRAAGKTYMIFFVVVIFLGSFYLINLILAVVAMAYEEQNQANIEEAKQKELEFQQMLDRLKKEQEEAEAIAAAAAEYTSIRRSRIMGLSESSSETSKLSSKSAKERRNRRKKKNQKKLSSGEEKGDAEKLSKSESEDSIRRKSFHLGVEGHRRAHEKRLSTPNQSPLSIRGSLFSARRSSRTSLFSFKGRGRDIGSETEFADDEHSIFGDNESRRGSLFVPHRPQERRSSNISQASRSPPMLPVNGKMHSAVDCNGVVSLVDGRSALMLPNGQLLPEGTTNQIHKKRRCSSYLLSEDMLNDPNLRQRAMSRASILTNTVEELEESRQKCPPWWYRFAHKFLIWNCSPYWIKFKKCIYFIVMDPFVDLAITICIVLNTLFMAMEHHPMTEEFKNVLAIGNLVFTGIFAAEMVLKLIAMDPYEYFQVGWNIFDSLIVTLSLVELFLADVEGLSVLRSFRLLRVFKLAKSWPTLNMLIKIIGNSVGALGNLTLVLAIIVFIFAVVGMQLFGKSYKECVCKINDDCTLPRWHMNDFFHSFLIVFRVLCGEWIETMWDCMEVAGQAMCLIVYMMVMVIGNLVVLNLFLALLLSSFSSDNLTAIEEDPDANNLQIAVTRIKKGINYVKQTLREFILKAFSKKPKISREIRQAEDLNTKKENYISNHTLAEMSKGHNFLKEKDKISGFGSSVDKHLMEDSDGQSFIHNPSLTVTVPIAPGESDLENMNAEELSSDSDSEYSKVRLNRSSSSECSTVDNPLPGEGEEAEAEPMNSDEPEACFTDGCVRRFSCCQVNIESGKGKIWWNIRKTCYKIVEHSWFESFIVLMILLSSGALAFEDIYIERKKTIKIILEYADKIFTYIFILEMLLKWIAYGYKTYFTNAWCWLDFLIVDVSLVTLVANTLGYSDLGPIKSLRTLRALRPLRALSRFEGMRVVVNALIGAIPSIMNVLLVCLIFWLIFSIMGVNLFAGKFYECINTTDGSRFPASQVPNRSECFALMNVSQNVRWKNLKVNFDNVGLGYLSLLQVATFKGWTIIMYAAVDSVNVDKQPKYEYSLYMYIYFVVFIIFGSFFTLNLFIGVIIDNFNQQKKKLGGQDIFMTEEQKKYYNAMKKLGSKKPQKPIPRPGNKIQGCIFDLVTNQAFDISIMVLICLNMVTMMVEKEGQSQHMTEVLYWINVVFIILFTGECVLKLISLRHYYFTVGWNIFDFVVVIISIVGMFLADLIETYFVSPTLFRVIRLARIGRILRLVKGAKGIRTLLFALMMSLPALFNIGLLLFLVMFIYAIFGMSNFAYVKKEDGINDMFNFETFGNSMICLFQITTSAGWDGLLAPILNSKPPDCDPKKVHPGSSVEGDCGNPSVGIFYFVSYIIISFLVVVNMYIAVILENFSVATEESTEPLSEDDFEMFYEVWEKFDPDATQFIEFSKLSDFAAALDPPLLIAKPNKVQLIAMDLPMVSGDRIHCLDILFAFTKRVLGESGEMDSLRSQMEERFMSANPSKVSYEPITTTLKRKQEDVSATVIQRAYRRYRLRQNVKNISSIYIKDGDRDDDLLNKKDMAFDNVNENSSPEKTDATSSTTSPPSYDSVTKPDKEKYEQDRTEKEDKGKDSKESKKENLYFQGDYKDHDGDYKDHDIDYKDDDDKHHHHHHHHHHGSGATNFSLLKQAGDVEENPGPMGRLLALVVGAALVSSACGGCVEVDSETEAVYGMTFKILCISCKRRSETNAETFTEWTFRQKGTEEFVKILRYENEVLQLEEDERFEGRVVWNGSRGTKDLQDLSIFITNVTYNHSGDYECHVYRLLFFENYEHNTSVVKKIHIEVVDKANRDMASIVSEIMMYVLIVVLTIWLVAEMIYCYKKIAAATETAAQENASEYLAITSESKENCTGVQVAEGSGATNFSLLKQAGDVEENPGPMHRDAWLPRPAFSLTGLSLFFSLVPPGRSMEVTVPATLNVLNGSDARLPCTFNSCYTVNHKQFSLNWTYQECNNCSEEMFLQFRMKIINLKLERFQDRVEFSGNPSKYDVSVMLRNVQPEDEGIYNCYIMNPPDRHRGHGKIHLQVLMEEPPERDSTVAVIVGASVGGFLAVVILVLMVVKCVRRKKEQKLSTDDLKTEEEGKTDGEGNPDDGAKGSGATNFSLLKQAGDVEENPGPMPAFNRLFPLASLVLIYWVSVCFPVCVEVPSETEAVQGNPMKLRCISCMKREEVEATTVVEWFYRPEGGKDFLIYEYRNGHQEVESPFQGRLQWNGSKDLQDVSITVLNVTLNDSGLYTCNVSREFEFEAHRPFVKTTRLIPLRVTEEAGEDFTSVVSEIMMYILLVFLTLWLLIEMIYCYRKVSKAEEAAQENASDYLAIPSENKENSAVPVEE

SEQ ID NO: 8 - protein, 2730 aa, Artificial Sequence
  huNav1.7(V331M)-beta1-beta2-beta3 viral P2A
MAMLPPPGPQSFVHFTKQSLALIEQRIAERKSKEPKEEKKDDDEEAPKPSSDLEAGKQLPFIYGDIPPGMVSEPLEDLDPYYADKKTFIVLNKGKTIFRFNATPALYMLSPFSPLRRISIKILVHSLFSMLIMCTILTNCIFMTMNNPPDWTKNVEYTFTGIYTFESLVKILARGFCVGEFTFLRDPWNWLDFVVIVFAYLTEFVNLGNVSALRTFRVLRALKTISVIPGLKTIVGALIQSVKKLSDVMILTVFCLSVFALIGLQLFMGNLKHKCFRNSLENNETLESIMNTLESEEDFRKYFYYLEGSKDALLCGFSTDSGQCPEGYTCMKIGRNPDYGYTSFDTFSWAFLALFRLMTQDYWENLYQQTLRAAGKTYMIFFVVVIFLGSFYLINLILAVVAMAYEEQNQANIEEAKQKELEFQQMLDRLKKEQEEAEAIAAAAAEYTSIRRSRIMGLSESSSETSKLSSKSAKERRNRRKKKNQKKLSSGEEKGDAEKLSKSESEDSIRRKSFHLGVEGHRRAHEKRLSTPNQSPLSIRGSLFSARRSSRTSLFSFKGRGRDIGSETEFADDEHSIFGDNESRRGSLFVPHRPQERRSSNISQASRSPPMLPVNGKMHSAVDCNGVVSLVDGRSALMLPNGQLLPEGTTNQIHKKRRCSSYLLSEDMLNDPNLRQRAMSRASILTNTVEELEESRQKCPPWWYRFAHKFLIWNCSPYWIKFKKCIYFIVMDPFVDLAITICIVLNTLFMAMEHHPMTEEFKNVLAIGNLVFTGIFAAEMVLKLIAMDPYEYFQVGWNIFDSLIVTLSLVELFLADVEGLSVLRSFRLLRVFKLAKSWPTLNMLIKIIGNSVGALGNLTLVLAIIVFIFAVVGMQLFGKSYKECVCKINDDCTLPRWHMNDFFHSFLIVFRVLCGEWIETMWDCMEVAGQAMCLIVYMMVMVIGNLVVLNLFLALLLSSFSSDNLTAIEEDPDANNLQIAVTRIKKGINYVKQTLREFILKAFSKKPKISREIRQAEDLNTKKENYISNHTLAEMSKGHNFLKEKDKISGFGSSVDKHLMEDSDGQSFIHNPSLTVTVPIAPGESDLENMNAEELSSDSDSEYSKVRLNRSSSSECSTVDNPLPGEGEEAEAEPMNSDEPEACFTDGCVRRFSCCQVNIESGKGKIWWNIRKTCYKIVEHSWFESFIVLMILLSSGALAFEDIYIERKKTIKIILEYADKIFTYIFILEMLLKWIAYGYKTYFTNAWCWLDFLIVDVSLVTLVANTLGYSDLGPIKSLRTLRALRPLRALSRFEGMRVVVNALIGAIPSIMNVLLVCLIFWLIFSIMGVNLFAGKFYECINTTDGSRFPASQVPNRSECFALMNVSQNVRWKNLKVNFDNVGLGYLSLLQVATFKGWTIIMYAAVDSVNVDKQPKYEYSLYMYIYFVVFIIFGSFFTLNLFIGVIIDNFNQQKKKLGGQDIFMTEEQKKYYNAMKKLGSKKPQKPIPRPGNKIQGCIFDLVTNQAFDISIMVLICLNMVTMMVEKEGQSQHMTEVLYWINVVFIILFTGECVLKLISLRHYYFTVGWNIFDFVVVIISIVGMFLADLIETYFVSPTLFRVIRLARIGRILRLVKGAKGIRTLLFALMMSLPALFNIGLLLFLVMFIYAIFGMSNFAYVKKEDGINDMFNFETFGNSMICLFQITTSAGWDGLLAPILNSKPPDCDPKKVHPGSSVEGDCGNPSVGIFYFVSYIIISFLVVVNMYIAVILENFSVATEESTEPLSEDDFEMFYEVWEKFDPDATQFIEFSKLSDFAAALDPPLLIAKPNKVQLIAMDLPMVSGDRIHCLDILFAFTKRVLGESGEMDSLRSQMEERFMSANPSKVSYEPITTTLKRKQEDVSATVIQRAYRRYRLRQNVKNISSIYIKDGDRDDDLLNKKDMAFDNVNENSSPEKTDATSSTTSPPSYDSVTKPDKEKYEQDRTEKEDKGKDSKESKKENLYFQGDYKDHDGDYKDHDIDYKDDDDKHHHHHHHHHHGSGATNFSLLKQAGDVEENPGPMGRLLALVVGAALVSSACGGCVEVDSETEAVYGMTFKILCISCKRRSETNAETFTEWTFRQKGTEEFVKILRYENEVLQLEEDERFEGRVVWNGSRGTKDLQDLSIFITNVTYNHSGDYECHVYRLLFFENYEHNTSVVKKIHIEVVDKANRDMASIVSEIMMYVLIVVLTIWLVAEMIYCYKKIAAATETAAQENASEYLAITSESKENCTGVQVAEGSGATNFSLLKQAGDVEENPGPMHRDAWLPRPAFSLTGLSLFFSLVPPGRSMEVTVPATLNVLNGSDARLPCTFNSCYTVNHKQFSLNWTYQECNNCSEEMFLQFRMKIINLKLERFQDRVEFSGNPSKYDVSVMLRNVQPEDEGIYNCYIMNPPDRHRGHGKIHLQVLMEEPPERDSTVAVIVGASVGGFLAVVILVLMVVKCVRRKKEQKLSTDDLKTEEEGKTDGEGNPDDGAKGSGATNFSLLKQAGDVEENPGPMPAFNRLFPLASLVLIYWVSVCFPVCVEVPSETEAVQGNPMKLRCISCMKREEVEATTVVEWFYRPEGGKDFLIYEYRNGHQEVESPFQGRLQWNGSKDLQDVSITVLNVTLNDSGLYTCNVSREFEFEAHRPFVKTTRLIPLRVTEEAGEDFTSVVSEIMMYILLVFLTLWLLIEMIYCYRKVSKAEEAAQENASDYLAIPSENKENSAVPVEE

SEQ ID NO: 9 - protein, 3055 aa, Artificial Sequence
  huNav1.7(N146S,V194I,F276V,R277Q,E281V,V331M,E504D,D507E,S508N,N5 33S)-beta1-beta2-beta3 viral P2A
MAMLPPPGPQSFVHFTKQSLALIEQRIAERKSKEPKEEKKDDDEEAPKPSSDLEAGKQLPFIYGDIPPGMVSEPLEDLDPYYADKKTFIVLNKGKTIFRFNATPALYMLSPFSPLRRISIKILVHSLFSMLIMCTILTNCIFMTMSNPPDWTKNVEYTFTGIYTFESLVKILARGFCVGEFTFLRDPWNWLDFIVIVFAYLTEFVNLGNVSALRTFRVLRALKTISVIPGLKTIVGALIQSVKKLSDVMILTVFCLSVFALIGLQLFMGNLKHKCVQNSLVNNETLESIMNTLESEEDFRKYFYYLEGSKDALLCGFSTDSGQCPEGYTCMKIGRNPDYGYTSFDTFSWAFLALFRLMTQMAMLPPPGPQSFVHFTKQSLALIEQRIAERKSKEPKEEKKDDDEEAPKPSSDLEAGKQLPFIYGDIPPGMVSEPLEDLDPYYADKKTFIVLNKGKTIFRFNATPALYMLSPFSPLRRISIKILVHSLFSMLIMCTILTNCIFMTMSNPPDWTKNVEYTFTGIYTFESLVKILARGFCVGEFTFLRDPWNWLDFIVIVFAYLTEFVNLGNVSALRTFRVLRALKTISVIPGLKTIVGALIQSVKKLSDVMILTVFCLSVFALIGLQLFMGNLKHKCVQNSLVNNETLESIMNTLESEEDFRKYFYYLEGSKDALLCGFSTDSGQCPEGYTCMKIGRNPDYGYTSFDTFSWAFLALFRLMTQDYWENLYQQTLRAAGKTYMIFFVVVIFLGSFYLINLILAVVAMAYEEQNQANIEEAKQKELEFQQMLDRLKKEQEEAEAIAAAAAEYTSIRRSRIMGLSESSSETSKLSSKSAKERRNRRKKKNQKKLSSGEEKGDAEKLSKSDSEENIRRKSFHLGVEGHRRAHEKRLSTPSQSPLSIRGSLFSARRSSRTSLFSFKGRGRDIGSETEFADDEHSIFGDNESRRGSLFVPHRPQERRSSNISQASRSPPMLPVNGKMHSAVDCNGVVSLVDGRSALMLPNGQLLPEGTTNQIHKKRRCSSYLLSEDMLNDPNLRQRAMSRASILTNTVEELEESRQKCPPWWYRFAHKFLIWNCSPYWIKFKKCIYFIVMDPFVDLAITICIVLNTLFMAMEHHPMTEEFKNVLAIGNLVFTGIFAAEMVLKLIAMDPYEYFQVGWNIFDSLIVTLSLVELFLADVEGLSVLRSFRLLRVFKLAKSWPTLNMLIKIIGNSVGALGNLTLVLAIIVFIFAVVGMQLFGKSYKECVCKINDDCTLPRWHMNDFFHSFLIVFRVLCGEWIETMWDCMEVAGQAMCLIVYMMVMVIGNLVVLNLFLALLLSSFSSDNLTAIEEDPDANNLQIAVTRIKKGINYVKQTLREFILKAFSKKPKISREIRQAEDLNTKKENYISNHTLAEMSKGHNFLKEKDKISGFGSSVDKHLMEDSDGQSFIHNPSLTVTVPIAPGESDLENMNAEELSSDSDSEYSKVRLNRSSSSECSTVDNPLPGEGEEAEAEPMNSDEPEACFTDGCVRRFSCCQVNIESGKGKIWWNIRKTCYKIVEHSWFESFIVLMILLSSGALAFEDIYIERKKTIKIILEYADKIFTYIFILEMLLKWIAYGYKTYFTNAWCWLDFLIVDVSLVTLVANTLGYSDLGPIKSLRTLRALRPLRALSRFEGMRVVVNALIGAIPSIMNVLLVCLIFWLIFSIMGVNLFAGKFYECINTTDGSRFPASQVPNRSECFALMNVSQNVRWKNLKVNFDNVGLGYLSLLQVATFKGWTIIMYAAVDSVNVDKQPKYEYSLYMYIYFVVFIIFGSFFTLNLFIGVIIDNFNQQKKKLGGQDIFMTEEQKKYYNAMKKLGSKKPQKPIPRPGNKIQGCIFDLVTNQAFDISIMVLICLNMVTMMVEKEGQSQHMTEVLYWINVVFIILFTGECVLKLISLRHYYFTVGWNIFDFVVVIISIVGMFLADLIETYFVSPTLFRVIRLARIGRILRLVKGAKGIRTLLFALMMSLPALFNIGLLLFLVMFIYAIFGMSNFAYVKKEDGINDMFNFETFGNSMICLFQITTSAGWDGLLAPILNSKPPDCDPKKVHPGSSVEGDCGNPSVGIFYFVSYIIISFLVVVNMYIAVILENFSVATEESTEPLSEDDFEMFYEVWEKFDPDATQFIEFSKLSDFAAALDPPLLIAKPNKVQLIAMDLPMVSGDRIHCLDILFAFTKRVLGESGEMDSLRSQMEERFMSANPSKVSYEPITTTLKRKQEDVSATVIQRAYRRYRLRQNVKNISSIYIKDGDRDDDLLNKKDMAFDNVNENSSPEKTDATSSTTSPPSYDSVTKPDKEKYEQDRTEKEDKGKDSKESKKSGRGSGATNFSLLKQAGDVEENPGPMGRLLALVVGAALVSSACGGCVEVDSETEAVYGMTFKILCISCKRRSETNAETFTEWTFRQKGTEEFVKILRYENEVLQLEEDERFEGRVVWNGSRGTKDLQDLSIFITNVTYNHSGDYECHVYRLLFFENYEHNTSVVKKIHIEVVDKANRDMASIVSEIMMYVLIVVLTIWLVAEMIYCYKKIAAATETAAQENASEYLAITSESKENCTGVQVAEGSGATNFSLLKQAGDVEENPGPMHRDAWLPRPAFSLTGLSLFFSLVPPGRSMEVTVPATLNVLNGSDARLPCTFNSCYTVNHKQFSLNWTYQECNNCSEEMFLQFRMKIINLKLERFQDRVEFSGNPSKYDVSVMLRNVQPEDEGIYNCYIMNPPDRHRGHGKIHLQVLMEEPPERDSTVAVIVGASVGGFLAVVILVLMVVKCVRRKKEQKLSTDDLKTEEEGKTDGEGNPDDGAKGSGATNFSLLKQAGDVEENPGPMPAFNRLFPLASLVLIYWVSVCFPVCVEVPSETEAVQGNPMKLRCISCMKREEVEATTVVEWFYRPEGGKDFLIYEYRNGHQEVESPFQGRLQWNGSKDLQDVSITVLNVTLNDSGLYTCNVSREFEFEAHRPFVKTTRLIPLRVTEEAGEDFTSVVSEIMMYILLVFLTLWLLIEMIYCYRKVSKAEEAAQENASDYLAIPSENKENSAVPVEEN

SEQ ID NO: 10 - protein, 1992 aa, Artificial Sequence
  huNav157 chimera 1
MAMLPPPGPQSFVHFTKQSLALIEQRIAERKSKEPKEEKKDDDEEAPKPSSDLEAGKQLPFIYGDIPPGMVSEPLEDLDPYYADKKTFIVLNKGKTIFRFNATPALYMLSPFSPLRRISIKILVHSLFSMLIMCTILTNCIFMTMNNPPDWTKNVEYTFTGIYTFESLVKILARGFCVGEFTFLRDPWNWLDFVVIVFAYLTEFVNLGNVSALRTFRVLRALKTISVIPGLKTIVGALIQSVKKLSDVMILTVFCLSVFALIGLQLFMGNLKHKCFRNSLENNETLESIMNTLESEEDFRKYFYYLEGSKDALLCGFSTDSGQCPEGYTCVKIGRNPDYGYTSFDTFSWAFLALFRLMTQDYWENLYQQTLRAAGKTYMIFFVVVIFLGSFYLINLILAVVAMAYEEQNQANIEEAKQKELEFQQMLDRLKKEQEEAEAIAAAAAEYTSIRRSRIMGLSESSSETSKLSSKSAKERRNRRKKKNQKKLSSGEEKGDAEKLSKSESEDSIRRKSFHLGVEGHRRAHEKRLSTPNQSPLSIRGSLFSARRSSRTSLFSFKGRGRDIGSETEFADDEHSIFGDNESRRGSLFVPHRPQERRSSNISQASRSPPMLPVNGKMHSAVDCNGVVSLVDGRSALMLPNGQLLPEGTTNQIHKKRRCSSYLLSEDMLNDPNLRQRAMSRASILTNTVEELEESRQKCPPWWYRFAHKFLIWNCSPYWIKFKKCIYFIVMDPFVDLAITICIVLNTLFMAMEHHPMTEEFKNVLAIGNLVFTGIFAAEMVLKLIAMDPYEYFQVGWNIFDSLIVTLSLVELFLADVEGLSVLRSFRLLRVFKLAKSWPTLNMLIKIIGNSVGALGNLTLVLAIIVFIFAVVGMQLFGKSYKECVCKINDDCTLPRWHMNDFFHSFLIVFRVLCGEWIETMWDCMEVAGQAMCLIVYMMVMVIGNLVVLNLFLALLLSSFSSDNLTAIEEDPDANNLQIAVTRIKKGINYVKQTLREFILKAFSKKPKISREIRQAEDLNTKKENYISNHTLAEMSKGHNFLKEKDKISGFGSSVDKHLMEDSDGQSFIHNPSLTVTVPIAPGESDLENMNAEELSSDSDSEYSKVRLNRSSSSECSTVDNPLPGEGEEAEAEPMNSDEPEACFTDGCVRRFSCCQVNIESGKGKIWWNIRKTCYKIVEHSWFESFIVLMILLSSGALAFEDIYIERKKTIKIILEYADKIFTYIFILEMLLKWIAYGYKTYFTNAWCWLDFLIVDVSLVTLVANTLGYSDLGPIKSLRTLRALRPLRALSRFEGMRVVVNALIGAIPSIMNVLLVCLIFWLIFSIMGVNLFAGKFYECINTTDGSRFPASQVPNRSECFALMNVSQNVRWKNLKVNFDNVGLGYLSLLQVATFKGWTIIMYAAVDSVNVDKQPKYEYSLYMYIYFVVFIIFGSFFTLNLFIGVIIDNFNQQKKKLGGQDIFMTEEQKKYYNAMKKLGSKKPQKPIPRPLNKYQGFIFDIVTKQAFDVTIMFLICLNMVTMMVETDDQSPEKINILAKINLLFVAIFTGECIVKLAALRHYYFTNSWNIFDFVVVILSIVGTVLSDIIQKYFFSPTLFRVIRLARIGRILRLIRGAKGIRTLLFALMMSLPALFNIGLLLFLVMFIYSIFGMANFAYVKWEAGIDDMFNFQTFANSMLCLFQITTSAGWDGLLSPILNTGPPYCDPTLPNSNGSRGDCGSPAVGILFFTTYIIISFLIVVNMYIAIILENFSVATEESTEPLSEDDFDMFYEIWEKFDPEATQFIEYSVLSDFADALSEPLRIAKPNQISLINMDLPMVSGDRIHCMDILFAFTKRVLGESGEMDALKIQMEEKFMAANPSKISYEPITTTLRRKHEEVSAMVIQRAFRRHLLQRSLKHASFLFRQQAGSGLSEEDAPEREGLIAYVMSENFSRPLGPPSSSSISSTSFPPSYDSVTRATSDNLQVRGSDYSHSEDLADFPPSPDRDRESIV

SEQ ID NO: 11 - protein, 2018 aa, Artificial Sequence
  huNav157 chimera 2
MAMLPPPGPQSFVHFTKQSLALIEQRIAERKSKEPKEEKKDDDEEAPKPSSDLEAGKQLPFIYGDIPPGMVSEPLEDLDPYYADKKTFIVLNKGKTIFRFNATPALYMLSPFSPLRRISIKILVHSLFSMLIMCTILTNCIFMTMNNPPDWTKNVEYTFTGIYTFESLVKILARGFCVGEFTFLRDPWNWLDFVVIVFAYLTEFVNLGNVSALRTFRVLRALKTISVIPGLKTIVGALIQSVKKLSDVMILTVFCLSVFALIGLQLFMGNLKHKCFRNSLENNETLESIMNTLESEEDFRKYFYYLEGSKDALLCGFSTDSGQCPEGYTCVKIGRNPDYGYTSFDTFSWAFLALFRLMTQDYWENLYQQTLRAAGKTYMIFFVVVIFLGSFYLINLILAVVAMAYEEQNQANIEEAKQKELEFQQMLDRLKKEQEEAEAIAAAAAEYTSIRRSRIMGLSESSSETSKLSSKSAKERRNRRKKKNQKKLSSGEEKGDAEKLSKSESEDSIRRKSFHLGVEGHRRAHEKRLSTPNQSPLSIRGSLFSARRSSRTSLFSFKGRGRDIGSETEFADDEHSIFGDNESRRGSLFVPHRPQERRSSNISQASRSPPMLPVNGKMHSAVDCNGVVSLVDGRSALMLPNGQLLPEGTTNQIHKKRRCSSYLLSEDMLNDPNLRQRAMSRASILTNTVEELEESRQKCPPWWYRFAHKFLIWNCSPYWIKFKKCIYFIVMDPFVDLAITICIVLNTLFMAMEHHPMTEEFKNVLAIGNLVFTGIFAAEMVLKLIAMDPYEYFQVGWNIFDSLIVTLSLVELFLADVEGLSVLRSFRLLRVFKLAKSWPTLNMLIKIIGNSVGALGNLTLVLAIIVFIFAVVGMQLFGKSYKECVCKINDDCTLPRWHMNDFFHSFLIVFRVLCGEWIETMWDCMEVAGQAMCLIVYMMVMVIGNLVVLNLFLALLLSSFSADNLTAPDEDREMNNLQLALARIQRGLRFVKRTTWDFCCGLLRQRPQKPAALAAQGQLPSCIATPYSPPPPETEKVPPTRKETRFEEGEQPGQGTPGDPEPVCVPIAVAESDTDDQEEDEENSLGTEEESSKQESQPVSGGPEAPPDSRTWSQVSATASSEAEASASQADWRQQWKAEPQAPGCGETPEDSCSEGSTADMTNTAELLEQIPDLGQDVKDPEDCFTEGCVRRCPCCAVDTTQAPGKVWWRLRKTCYHIVEHSWFETFIIFMILLSSGALAFEDIYLEERKTIKVLLEYADKMFTYVFVLEMLLKWVAYGFKKYFTNAWCWLDFLIVDVSLVSLVANTLGFAEMGPIKSLRTLRALRPLRALSRFEGMRVVVNALVGAIPSIMNVLLVCLIFWLIFSIMGVNLFAGKFGRCINQTEGDLPLNYTIVNNKSQCESLNLTGELYWTKVKVNFDNVGAGYLALLQVATFKGWMDIMYAAVDSRGYEEQPQWEYNLYMYIYFVIFIIFGSFFTLNLFIGVIIDNFNQQKKKLGGQDIFMTEEQKKYYNAMKKLGSKKPQKPIPRPGNKIQGCIFDLVTNQAFDISIMVLICLNMVTMMVEKEGQSQHMTEVLYWINVVFIILFTGECVLKLISLRHYYFTVGWNIFDFVVVIISIVGMFLADLIETYFVSPTLFRVIRLARIGRILRLVKGAKGIRTLLFALMMSLPALFNIGLLLFLVMFIYAIFGMSNFAYVKKEDGINDMFNFETFGNSMICLFQITTSAGWDGLLAPILNSKPPDCDPKKVHPGSSVEGDCGNPSVGIFYFVSYIIISFLVVVNMYIAVILENFSVATEESTEPLSEDDFEMFYEVWEKFDPDATQFIEFSKLSDFAAALDPPLLIAKPNKVQLIAMDLPMVSGDRIHCLDILFAFTKRVLGESGEMDSLRSQMEERFMSANPSKVSYEPITTTLKRKQEDVSATVIQRAYRRYRLRQNVKNISSIYIKDGDRDDDLLNKKDMAFDNVNENSSPEKTDATSSTTSPPSYDSVTKPDKEKYEQDRTEKEDKGKDSKESKK

SEQ ID NO: 12 - protein, 1948 aa, Artificial Sequence
  huNav157 chimera 3
MAMLPPPGPQSFVHFTKQSLALIEQRIAERKSKEPKEEKKDDDEEAPKPSSDLEAGKQLPFIYGDIPPGMVSEPLEDLDPYYADKKTFIVLNKGKTIFRFNATPALYMLSPFSPLRRISIKILVHSLFSMLIMCTILTNCIFMTMNNPPDWTKNVEYTFTGIYTFESLVKILARGFCVGEFTFLRDPWNWLDFVVIVFAYLTEFVNLGNVSALRTFRVLRALKTISVIPGLKTIVGALIQSVKKLSDVMILTVFCLSVFALIGLQLFMGNLKHKCFRNSLENNETLESIMNTLESEEDFRKYFYYLEGSKDALLCGFSTDSGQCPEGYTCVKIGRNPDYGYTSFDTFSWAFLALFRLMTQDYWENLYQQTLRAAGKTYMIFFVVVIFLGSFYLINLILAVVAMAYEEQNQATIAETEEKEKRFQEAMEMLKKEHEALTIRGVDTVSRSSLEMSPLAPVNSHERRSKRRKRMSSGTEECGEDRLPKSDSEDGPRAMNHLSLTRGLSRTSMKPRSSRGSIFTFRRRDLGSEADFADDENSTAGESESHHTSLLVPWPLRRTSAQGQPSPGTSAPGHALHGKKNSTVDCNGVVSLLGAGDPEATSPGSHLLRPVMLEHPPDTTTPSEEPGGPQMLTSQAPCVDGFEEPGARQRALSAVSVLTSALEELEESRHKCPPCWNRLAQRYLIWECCPLWMSIKQGVKLVVMDPFTDLTITMCIVLNTLFMALEHYNMTSEFEEMLQVGNLVFTGIFTAEMTFKIIALDPYYYFQQGWNIFDSIIVILSLMELGLSRMSNLSVLRSFRLLRVFKLAKSWPTLNTLIKIIGNSVGALGNLTLVLAIIVFIFAVVGMQLFGKNYSELRDSDSGLLPRWHMMDFFHAFLIIFRILCGEWIETMWDCMEVSGQSLCLLVFLLVMVIGNLVVLNLFLALLLSSFSSDNLTAIEEDPDANNLQIAVTRIKKGINYVKQTLREFILKAFSKKPKISREIRQAEDLNTKKENYISNHTLAEMSKGHNFLKEKDKISGFGSSVDKHLMEDSDGQSFIHNPSLTVTVPIAPGESDLENMNAEELSSDSDSEYSKVRLNRSSSSECSTVDNPLPGEGEEAEAEPMNSDEPEACFTDGCVRRFSCCQVNIESGKGKIWWNIRKTCYKIVEHSWFESFIVLMILLSSGALAFEDIYIERKKTIKIILEYADKIFTYIFILEMLLKWIAYGYKTYFTNAWCWLDFLIVDVSLVTLVANTLGYSDLGPIKSLRTLRALRPLRALSRFEGMRVVVNALIGAIPSIMNVLLVCLIFWLIFSIMGVNLFAGKFYECINTTDGSRFPASQVPNRSECFALMNVSQNVRWKNLKVNFDNVGLGYLSLLQVATFKGWTIIMYAAVDSVNVDKQPKYEYSLYMYIYFVVFIIFGSFFTLNLFIGVIIDNFNQQKKKLGGQDIFMTEEQKKYYNAMKKLGSKKPQKPIPRPGNKIQGCIFDLVTNQAFDISIMVLICLNMVTMMVEKEGQSQHMTEVLYWINVVFIILFTGECVLKLISLRHYYFTVGWNIFDFVVVIISIVGMFLADLIETYFVSPTLFRVIRLARIGRILRLVKGAKGIRTLLFALMMSLPALFNIGLLLFLVMFIYAIFGMSNFAYVKKEDGINDMFNFETFGNSMICLFQITTSAGWDGLLAPILNSKPPDCDPKKVHPGSSVEGDCGNPSVGIFYFVSYIIISFLVVVNMYIAVILENFSVATEESTEPLSEDDFEMFYEVWEKFDPDATQFIEFSKLSDFAAALDPPLLIAKPNKVQLIAMDLPMVSGDRIHCLDILFAFTKRVLGESGEMDSLRSQMEERFMSANPSKVSYEPITTTLKRKQEDVSATVIQRAYRRYRLRQNVKNISSIYIKDGDRDDDLLNKKDMAFDNVNENSSPEKTDATSSTTSPPSYDSVTKPDKEKYEQDRTEKEDKGKDSKESKK

SEQ ID NO: 13 - protein, 1988 aa, Artificial Sequence
  huNav157 chimera 4
MANFLLPRGTSSFRRFTRESLAAIEKRMAEKQARGSTTLQESREGLPEEEAPRPQLDLQASKKLPDLYGNPPQELIGEPLEDLDPFYSTQKTFIVLNKGKTIFRFSATNALYVLSPFHPIRRAAVKILVHSLFNMLIMCTILTNCVFMAQHDPPPWTKYVEYTFTAIYTFESLVKILARGFCLHAFTFLRDPWNWLDFSVIIMAYTTEFVDLGNVSALRTFRVLRALKTISVISGLKTIVGALIQSVKKLADVMVLTVFCLSVFALIGLQLFMGNLRHKCVRNFTALNGTNGSVEADGLVWESLDLYLSDPENYLLKNGTSDVLLCGNSSDAGTCPEGYRCLKAGENPDHGYTSFDSFAWAFLALFRLMTQDCWERLYQQTLRSAGKIYMIFFMLVIFLGSFYLVNLILAVVAMAYEEQNQANIEEAKQKELEFQQMLDRLKKEQEEAEAIAAAAAEYTSIRRSRIMGLSESSSETSKLSSKSAKERRNRRKKKNQKKLSSGEEKGDAEKLSKSESEDSIRRKSFHLGVEGHRRAHEKRLSTPNQSPLSIRGSLFSARRSSRTSLFSFKGRGRDIGSETEFADDEHSIFGDNESRRGSLFVPHRPQERRSSNISQASRSPPMLPVNGKMHSAVDCNGVVSLVDGRSALMLPNGQLLPEGTTNQIHKKRRCSSYLLSEDMLNDPNLRQRAMSRASILTNTVEELEESRQKCPPWWYRFAHKFLIWNCSPYWIKFKKCIYFIVMDPFVDLAITICIVLNTLFMAMEHHPMTEEFKNVLAIGNLVFTGIFAAEMVLKLIAMDPYEYFQVGWNIFDSLIVTLSLVELFLADVEGLSVLRSFRLLRVFKLAKSWPTLNMLIKIIGNSVGALGNLTLVLAIIVFIFAVVGMQLFGKSYKECVCKINDDCTLPRWHMNDFFHSFLIVFRVLCGEWIETMWDCMEVAGQAMCLIVYMMVMVIGNLVVLNLFLALLLSSFSSDNLTAIEEDPDANNLQIAVTRIKKGINYVKQTLREFILKAFSKKPKISREIRQAEDLNTKKENYISNHTLAEMSKGHNFLKEKDKISGFGSSVDKHLMEDSDGQSFIHNPSLTVTVPIAPGESDLENMNAEELSSDSDSEYSKVRLNRSSSSECSTVDNPLPGEGEEAEAEPMNSDEPEACFTDGCVRRFSCCQVNIESGKGKIWWNIRKTCYKIVEHSWFESFIVLMILLSSGALAFEDIYIERKKTIKIILEYADKIFTYIFILEMLLKWIAYGYKTYFTNAWCWLDFLIVDVSLVTLVANTLGYSDLGPIKSLRTLRALRPLRALSRFEGMRVVVNALIGAIPSIMNVLLVCLIFWLIFSIMGVNLFAGKFYECINTTDGSRFPASQVPNRSECFALMNVSQNVRWKNLKVNFDNVGLGYLSLLQVATFKGWTIIMYAAVDSVNVDKQPKYEYSLYMYIYFVVFIIFGSFFTLNLFIGVIIDNFNQQKKKLGGQDIFMTEEQKKYYNAMKKLGSKKPQKPIPRPGNKIQGCIFDLVTNQAFDISIMVLICLNMVTMMVEKEGQSQHMTEVLYWINVVFIILFTGECVLKLISLRHYYFTVGWNIFDFVVVIISIVGMFLADLIETYFVSPTLFRVIRLARIGRILRLVKGAKGIRTLLFALMMSLPALFNIGLLLFLVMFIYAIFGMSNFAYVKKEDGINDMFNFETFGNSMICLFQITTSAGWDGLLAPILNSKPPDCDPKKVHPGSSVEGDCGNPSVGIFYFVSYIIISFLVVVNMYIAVILENFSVATEESTEPLSEDDFEMFYEVWEKFDPDATQFIEFSKLSDFAAALDPPLLIAKPNKVQLIAMDLPMVSGDRIHCLDILFAFTKRVLGESGEMDSLRSQMEERFMSANPSKVSYEPITTTLKRKQEDVSATVIQRAYRRYRLRQNVKNISSIYIKDGDRDDDLLNKKDMAFDNVNENSSPEKTDATSSTTSPPSYDSVTKPDKEKYEQDRTEKEDKGKDSKESKK

SEQ ID NO: 14 - protein, 2000 aa, Artificial Sequence
  huNav157 chimera 5
MANFLLPRGTSSFRRFTRESLAAIEKRMAEKQARGSTTLQESREGLPEEEAPRPQLDLQASKKLPDLYGNPPQELIGEPLEDLDPFYSTQKTFIVLNKGKTIFRFSATNALYVLSPFHPIRRAAVKILVHSLFNMLIMCTILTNCVFMAQHDPPPWTKYVEYTFTAIYTFESLVKILARGFCLHAFTFLRDPWNWLDFSVIIMAYTTEFVDLGNVSALRTFRVLRALKTISVISGLKTIVGALIQSVKKLADVMVLTVFCLSVFALIGLQLFMGNLRHKCVRNFTALNGTNGSVEADGLVWESLDLYLSDPENYLLKNGTSDVLLCGNSSDAGTCPEGYRCLKAGENPDHGYTSFDSFAWAFLALFRLMTQDCWERLYQQTLRSAGKIYMIFFMLVIFLGSFYLVNLILAVVAMAYEEQNQATIAETEEKEKRFQEAMEMLKKEHEALTIRGVDTVSRSSLEMSPLAPVNSHERRSKRRKRMSSGTEECGEDRLPKSDSEDGPRAMNHLSLTRGLSRTSMKPRSSRGSIFTFRRRDLGSEADFADDENSTAGESESHHTSLLVPWPLRRTSAQGQPSPGTSAPGHALHGKKNSTVDCNGVVSLLGAGDPEATSPGSHLLRPVMLEHPPDTTTPSEEPGGPQMLTSQAPCVDGFEEPGARQRALSAVSVLTSALEELEESRHKCPPCWNRLAQRYLIWECCPLWMSIKQGVKLVVMDPFTDLTITMCIVLNTLFMALEHYNMTSEFEEMLQVGNLVFTGIFTAEMTFKIIALDPYYYFQQGWNIFDSIIVILSLMELGLSRMSNLSVLRSFRLLRVFKLAKSWPTLNTLIKIIGNSVGALGNLTLVLAIIVFIFAVVGMQLFGKNYSELRDSDSGLLPRWHMMDFFHAFLIIFRILCGEWIETMWDCMEVSGQSLCLLVFLLVMVIGNLVVLNLFLALLLSSFSADNLTAPDEDREMNNLQLALARIQRGLRFVKRTTWDFCCGLLRQRPQKPAALAAQGQLPSCIATPYSPPPPETEKVPPTRKETRFEEGEQPGQGTPGDPEPVCVPIAVAESDTDDQEEDEENSLGTEEESSKQESQPVSGGPEAPPDSRTWSQVSATASSEAEASASQADWRQQWKAEPQAPGCGETPEDSCSEGSTADMTNTAELLEQIPDLGQDVKDPEDCFTEGCVRRCPCCAVDTTQAPGKVWWRLRKTCYHIVEHSWFETFIIFMILLSSGALAFEDIYLEERKTIKVLLEYADKMFTYVFVLEMLLKWVAYGFKKYFTNAWCWLDFLIVDVSLVSLVANTLGFAEMGPIKSLRTLRALRPLRALSRFEGMRVVVNALVGAIPSIMNVLLVCLIFWLIFSIMGVNLFAGKFGRCINQTEGDLPLNYTIVNNKSQCESLNLTGELYWTKVKVNFDNVGAGYLALLQVATFKGWMDIMYAAVDSRGYEEQPQWEYNLYMYIYFVIFIIFGSFFTLNLFIGVIIDNFNQQKKKLGGQDIFMTEEQKKYYNAMKKLGSKKPQKPIPRPGNKIQGCIFDLVTNQAFDISIMVLICLNMVTMMVEKEGQSQHMTEVLYWINVVFIILFTGECVLKLISLRHYYFTVGWNIFDFVVVIISIVGMFLADLIETYFVSPTLFRVIRLARIGRILRLVKGAKGIRTLLFALMMSLPALFNIGLLLFLVMFIYAIFGMSNFAYVKKEDGINDMFNFETFGNSMICLFQITTSAGWDGLLAPILNSKPPDCDPKKVHPGSSVEGDCGNPSVGIFYFVSYIIISFLVVVNMYIAVILENFSVATEESTEPLSEDDFEMFYEVWEKFDPDATQFIEFSKLSDFAAALDPPLLIAKPNKVQLIAMDLPMVSGDRIHCLDILFAFTKRVLGESGEMDSLRSQMEERFMSANPSKVSYEPITTTLKRKQEDVSATVIQRAYRRYRLRQNVKNISSIYIKDGDRDDDLLNKKDMAFDNVNENSSPEKTDATSSTTSPPSYDSVTKPDKEKYEQDRTEKEDKGKDSKESKK

SEQ ID NO: 15 - protein, 1974 aa, Artificial Sequence
  huNav157 chimera 6
MANFLLPRGTSSFRRFTRESLAAIEKRMAEKQARGSTTLQESREGLPEEEAPRPQLDLQASKKLPDLYGNPPQELIGEPLEDLDPFYSTQKTFIVLNKGKTIFRFSATNALYVLSPFHPIRRAAVKILVHSLFNMLIMCTILTNCVFMAQHDPPPWTKYVEYTFTAIYTFESLVKILARGFCLHAFTFLRDPWNWLDFSVIIMAYTTEFVDLGNVSALRTFRVLRALKTISVISGLKTIVGALIQSVKKLADVMVLTVFCLSVFALIGLQLFMGNLRHKCVRNFTALNGTNGSVEADGLVWESLDLYLSDPENYLLKNGTSDVLLCGNSSDAGTCPEGYRCLKAGENPDHGYTSFDSFAWAFLALFRLMTQDCWERLYQQTLRSAGKIYMIFFMLVIFLGSFYLVNLILAVVAMAYEEQNQATIAETEEKEKRFQEAMEMLKKEHEALTIRGVDTVSRSSLEMSPLAPVNSHERRSKRRKRMSSGTEECGEDRLPKSDSEDGPRAMNHLSLTRGLSRTSMKPRSSRGSIFTFRRRDLGSEADFADDENSTAGESESHHTSLLVPWPLRRTSAQGQPSPGTSAPGHALHGKKNSTVDCNGVVSLLGAGDPEATSPGSHLLRPVMLEHPPDTTTPSEEPGGPQMLTSQAPCVDGFEEPGARQRALSAVSVLTSALEELEESRHKCPPCWNRLAQRYLIWECCPLWMSIKQGVKLVVMDPFTDLTITMCIVLNTLFMALEHYNMTSEFEEMLQVGNLVFTGIFTAEMTFKIIALDPYYYFQQGWNIFDSIIVILSLMELGLSRMSNLSVLRSFRLLRVFKLAKSWPTLNTLIKIIGNSVGALGNLTLVLAIIVFIFAVVGMQLFGKNYSELRDSDSGLLPRWHMMDFFHAFLIIFRILCGEWIETMWDCMEVSGQSLCLLVFLLVMVIGNLVVLNLFLALLLSSFSSDNLTAIEEDPDANNLQIAVTRIKKGINYVKQTLREFILKAFSKKPKISREIRQAEDLNTKKENYISNHTLAEMSKGHNFLKEKDKISGFGSSVDKHLMEDSDGQSFIHNPSLTVTVPIAPGESDLENMNAEELSSDSDSEYSKVRLNRSSSSECSTVDNPLPGEGEEAEAEPMNSDEPEACFTDGCVRRFSCCQVNIESGKGKIWWNIRKTCYKIVEHSWFESFIVLMILLSSGALAFEDIYIERKKTIKIILEYADKIFTYIFILEMLLKWIAYGYKTYFTNAWCWLDFLIVDVSLVTLVANTLGYSDLGPIKSLRTLRALRPLRALSRFEGMRVVVNALIGAIPSIMNVLLVCLIFWLIFSIMGVNLFAGKFYECINTTDGSRFPASQVPNRSECFALMNVSQNVRWKNLKVNFDNVGLGYLSLLQVATFKGWTIIMYAAVDSVNVDKQPKYEYSLYMYIYFVVFIIFGSFFTLNLFIGVIIDNFNQQKKKLGGQDIFMTEEQKKYYNAMKKLGSKKPQKPIPRPLNKYQGFIFDIVTKQAFDVTIMFLICLNMVTMMVETDDQSPEKINILAKINLLFVAIFTGECIVKLAALRHYYFTNSWNIFDFVVVILSIVGTVLSDIIQKYFFSPTLFRVIRLARIGRILRLIRGAKGIRTLLFALMMSLPALFNIGLLLFLVMFIYSIFGMANFAYVKWEAGIDDMFNFQTFANSMLCLFQITTSAGWDGLLSPILNTGPPYCDPTLPNSNGSRGDCGSPAVGILFFTTYIIISFLIVVNMYIAIILENFSVATEESTEPLSEDDFDMFYEIWEKFDPEATQFIEYSVLSDFADALSEPLRIAKPNQISLINMDLPMVSGDRIHCMDILFAFTKRVLGESGEMDALKIQMEEKFMAANPSKISYEPITTTLRRKHEEVSAMVIQRAFRRHLLQRSLKHASFLFRQQAGSGLSEEDAPEREGLIAYVMSENFSRPLGPPSSSSISSTSFPPSYDSVTRATSDNLQVRGSDYSHSEDLADFPPSPDRDRESIV

SEQ ID NO: 16 - protein, 2044 aa, Artificial Sequence
  huNav157 chimera 7
MANFLLPRGTSSFRRFTRESLAAIEKRMAEKQARGSTTLQESREGLPEEEAPRPQLDLQASKKLPDLYGNPPQELIGEPLEDLDPFYSTQKTFIVLNKGKTIFRFSATNALYVLSPFHPIRRAAVKILVHSLFNMLIMCTILTNCVFMAQHDPPPWTKYVEYTFTAIYTFESLVKILARGFCLHAFTFLRDPWNWLDFSVIIMAYTTEFVDLGNVSALRTFRVLRALKTISVISGLKTIVGALIQSVKKLADVMVLTVFCLSVFALIGLQLFMGNLRHKCVRNFTALNGTNGSVEADGLVWESLDLYLSDPENYLLKNGTSDVLLCGNSSDAGTCPEGYRCLKAGENPDHGYTSFDSFAWAFLALFRLMTQDCWERLYQQTLRSAGKIYMIFFMLVIFLGSFYLVNLILAVVAMAYEEQNQANIEEAKQKELEFQQMLDRLKKEQEEAEAIAAAAAEYTSIRRSRIMGLSESSSETSKLSSKSAKERRNRRKKKNQKKLSSGEEKGDAEKLSKSESEDSIRRKSFHLGVEGHRRAHEKRLSTPNQSPLSIRGSLFSARRSSRTSLFSFKGRGRDIGSETEFADDEHSIFGDNESRRGSLFVPHRPQERRSSNISQASRSPPMLPVNGKMHSAVDCNGVVSLVDGRSALMLPNGQLLPEGTTNQIHKKRRCSSYLLSEDMLNDPNLRQRAMSRASILTNTVEELEESRQKCPPWWYRFAHKFLIWNCSPYWIKFKKCIYFIVMDPFVDLAITICIVLNTLFMAMEHHPMTEEFKNVLAIGNLVFTGIFAAEMVLKLIAMDPYEYFQVGWNIFDSLIVTLSLVELFLADVEGLSVLRSFRLLRVFKLAKSWPTLNMLIKIIGNSVGALGNLTLVLAIIVFIFAVVGMQLFGKSYKECVCKINDDCTLPRWHMNDFFHSFLIVFRVLCGEWIETMWDCMEVAGQAMCLIVYMMVMVIGNLVVLNLFLALLLSSFSADNLTAPDEDREMNNLQLALARIQRGLRFVKRTTWDFCCGLLRQRPQKPAALAAQGQLPSCIATPYSPPPPETEKVPPTRKETRFEEGEQPGQGTPGDPEPVCVPIAVAESDTDDQEEDEENSLGTEEESSKQESQPVSGGPEAPPDSRTWSQVSATASSEAEASASQADWRQQWKAEPQAPGCGETPEDSCSEGSTADMTNTAELLEQIPDLGQDVKDPEDCFTEGCVRRCPCCAVDTTQAPGKVWWRLRKTCYHIVEHSWFETFIIFMILLSSGALAFEDIYLEERKTIKVLLEYADKMFTYVFVLEMLLKWVAYGFKKYFTNAWCWLDFLIVDVSLVSLVANTLGFAEMGPIKSLRTLRALRPLRALSRFEGMRVVVNALVGAIPSIMNVLLVCLIFWLIFSIMGVNLFAGKFGRCINQTEGDLPLNYTIVNNKSQCESLNLTGELYWTKVKVNFDNVGAGYLALLQVATFKGWMDIMYAAVDSRGYEEQPQWEYNLYMYIYFVIFIIFGSFFTLNLFIGVIIDNFNQQKKKLGGQDIFMTEEQKKYYNAMKKLGSKKPQKPIPRPLNKYQGFIFDIVTKQAFDVTIMFLICLNMVTMMVETDDQSPEKINILAKINLLFVAIFTGECIVKLAALRHYYFTNSWNIFDFVVVILSIVGTVLSDIIQKYFFSPTLFRVIRLARIGRILRLIRGAKGIRTLLFALMMSLPALFNIGLLLFLVMFIYSIFGMANFAYVKWEAGIDDMFNFQTFANSMLCLFQITTSAGWDGLLSPILNTGPPYCDPTLPNSNGSRGDCGSPAVGILFFTTYIIISFLIVVNMYIAIILENFSVATEESTEPLSEDDFDMFYEIWEKFDPEATQFIEYSVLSDFADALSEPLRIAKPNQISLINMDLPMVSGDRIHCMDILFAFTKRVLGESGEMDALKIQMEEKFMAANPSKISYEPITTTLRRKHEEVSAMVIQRAFRRHLLQRSLKHASFLFRQQAGSGLSEEDAPEREGLIAYVMSENFSRPLGPPSSSSISSTSFPPSYDSVTRATSDNLQVRGSDYSHSEDLADFPPSPDRDRESIV

SEQ ID NO: 17 - protein, 2004 aa, Artificial Sequence
  huNav157 chimera 8
MAMLPPPGPQSFVHFTKQSLALIEQRIAERKSKEPKEEKKDDDEEAPKPSSDLEAGKQLPFIYGDIPPGMVSEPLEDLDPYYADKKTFIVLNKGKTIFRFNATPALYMLSPFSPLRRISIKILVHSLFSMLIMCTILTNCIFMTMNNPPDWTKNVEYTFTGIYTFESLVKILARGFCVGEFTFLRDPWNWLDFVVIVFAYLTEFVNLGNVSALRTFRVLRALKTISVIPGLKTIVGALIQSVKKLSDVMILTVFCLSVFALIGLQLFMGNLKHKCFRNSLENNETLESIMNTLESEEDFRKYFYYLEGSKDALLCGFSTDSGQCPEGYTCVKIGRNPDYGYTSFDTFSWAFLALFRLMTQDYWENLYQQTLRAAGKTYMIFFVVVIFLGSFYLINLILAVVAMAYEEQNQATIAETEEKEKRFQEAMEMLKKEHEALTIRGVDTVSRSSLEMSPLAPVNSHERRSKRRKRMSSGTEECGEDRLPKSDSEDGPRAMNHLSLTRGLSRTSMKPRSSRGSIFTFRRRDLGSEADFADDENSTAGESESHHTSLLVPWPLRRTSAQGQPSPGTSAPGHALHGKKNSTVDCNGVVSLLGAGDPEATSPGSHLLRPVMLEHPPDTTTPSEEPGGPQMLTSQAPCVDGFEEPGARQRALSAVSVLTSALEELEESRHKCPPCWNRLAQRYLIWECCPLWMSIKQGVKLVVMDPFTDLTITMCIVLNTLFMALEHYNMTSEFEEMLQVGNLVFTGIFTAEMTFKIIALDPYYYFQQGWNIFDSIIVILSLMELGLSRMSNLSVLRSFRLLRVFKLAKSWPTLNTLIKIIGNSVGALGNLTLVLAIIVFIFAVVGMQLFGKNYSELRDSDSGLLPRWHMMDFFHAFLIIFRILCGEWIETMWDCMEVSGQSLCLLVFLLVMVIGNLVVLNLFLALLLSSFSADNLTAPDEDREMNNLQLALARIQRGLRFVKRTTWDFCCGLLRQRPQKPAALAAQGQLPSCIATPYSPPPPETEKVPPTRKETRFEEGEQPGQGTPGDPEPVCVPIAVAESDTDDQEEDEENSLGTEEESSKQESQPVSGGPEAPPDSRTWSQVSATASSEAEASASQADWRQQWKAEPQAPGCGETPEDSCSEGSTADMTNTAELLEQIPDLGQDVKDPEDCFTEGCVRRCPCCAVDTTQAPGKVWWRLRKTCYHIVEHSWFETFIIFMILLSSGALAFEDIYLEERKTIKVLLEYADKMFTYVFVLEMLLKWVAYGFKKYFTNAWCWLDFLIVDVSLVSLVANTLGFAEMGPIKSLRTLRALRPLRALSRFEGMRVVVNALVGAIPSIMNVLLVCLIFWLIFSIMGVNLFAGKFGRCINQTEGDLPLNYTIVNNKSQCESLNLTGELYWTKVKVNFDNVGAGYLALLQVATFKGWMDIMYAAVDSRGYEEQPQWEYNLYMYIYFVIFIIFGSFFTLNLFIGVIIDNFNQQKKKLGGQDIFMTEEQKKYYNAMKKLGSKKPQKPIPRPLNKYQGFIFDIVTKQAFDVTIMFLICLNMVTMMVETDDQSPEKINILAKINLLFVAIFTGECIVKLAALRHYYFTNSWNIFDFVVVILSIVGTVLSDIIQKYFFSPTLFRVIRLARIGRILRLIRGAKGIRTLLFALMMSLPALFNIGLLLFLVMFIYSIFGMANFAYVKWEAGIDDMFNFQTFANSMLCLFQITTSAGWDGLLSPILNTGPPYCDPTLPNSNGSRGDCGSPAVGILFFTTYIIISFLIVVNMYIAIILENFSVATEESTEPLSEDDFDMFYEIWEKFDPEATQFIEYSVLSDFADALSEPLRIAKPNQISLINMDLPMVSGDRIHCMDILFAFTKRVLGESGEMDALKIQMEEKFMAANPSKISYEPITTTLRRKHEEVSAMVIQRAFRRHLLQRSLKHASFLFRQQAGSGLSEEDAPEREGLIAYVMSENFSRPLGPPSSSSISSTSFPPSYDSVTRATSDNLQVRGSDYSHSEDLADFPPSPDRDRESIV

SEQ ID NO: 18 - protein, 1983 aa, Artificial Sequence
  huNav157 chimera 12
MAMLPPPGPQSFVHFTKQSLALIEQRIAERKSKEPKEEKKDDDEEAPKPSSDLEAGKQLPFIYGDIPPGMVSEPLEDLDPYYADKKTFIVLNKGKTIFRFNATPALYMLSPFSPLRRISIKILVHSLFSMLIMCTILTNCIFMTMNNPPDWTKNVEYTFTGIYTFESLVKILARGFCVGEFTFLRDPWNWLDFVVIVFAYLTEFVNLGNVSALRTFRVLRALKTISVIPGLKTIVGALIQSVKKLSDVMVLTVFCLSVFALIGLQLFMGNLRHKCVRNFTALNGTNGSVEADGLVWESLDLYLSDPENYLLKNGTSDVLLCGNSSDAGTCPEGYRCLKAGENPDHGYTSFDSFAWAFLALFRLMTQDCWERLYQQTLRSAGKIYMIFFMLVIFLGSFYLVNLILAVVAMAYEEQNQANIEEAKQKELEFQQMLDRLKKEQEEAEAIAAAAAEYTSIRRSRIMGLSESSSETSKLSSKSAKERRNRRKKKNQKKLSSGEEKGDAEKLSKSESEDSIRRKSFHLGVEGHRRAHEKRLSTPNQSPLSIRGSLFSARRSSRTSLFSFKGRGRDIGSETEFADDEHSIFGDNESRRGSLFVPHRPQERRSSNISQASRSPPMLPVNGKMHSAVDCNGVVSLVDGRSALMLPNGQLLPEGTTNQIHKKRRCSSYLLSEDMLNDPNLRQRAMSRASILTNTVEELEESRQKCPPWWYRFAHKFLIWNCSPYWIKFKKCIYFIVMDPFVDLAITICIVLNTLFMAMEHHPMTEEFKNVLAIGNLVFTGIFAAEMVLKLIAMDPYEYFQVGWNIFDSLIVTLSLVELFLADVEGLSVLRSFRLLRVFKLAKSWPTLNMLIKIIGNSVGALGNLTLVLAIIVFIFAVVGMQLFGKSYKECVCKINDDCTLPRWHMNDFFHSFLIVFRVLCGEWIETMWDCMEVAGQAMCLIVYMMVMVIGNLVVLNLFLALLLSSFSSDNLTAIEEDPDANNLQIAVTRIKKGINYVKQTLREFILKAFSKKPKISREIRQAEDLNTKKENYISNHTLAEMSKGHNFLKEKDKISGFGSSVDKHLMEDSDGQSFIHNPSLTVTVPIAPGESDLENMNAEELSSDSDSEYSKVRLNRSSSSECSTVDNPLPGEGEEAEAEPMNSDEPEACFTDGCVRRFSCCQVNIESGKGKIWWNIRKTCYKIVEHSWFESFIVLMILLSSGALAFEDIYIERKKTIKIILEYADKIFTYIFILEMLLKWIAYGYKTYFTNAWCWLDFLIVDVSLVTLVANTLGYSDLGPIKSLRTLRALRPLRALSRFEGMRVVVNALIGAIPSIMNVLLVCLIFWLIFSIMGVNLFAGKFYECINTTDGSRFPASQVPNRSECFALMNVSQNVRWKNLKVNFDNVGLGYLSLLQVATFKGWTIIMYAAVDSVNVDKQPKYEYSLYMYIYFVVFIIFGSFFTLNLFIGVIIDNFNQQKKKLGGQDIFMTEEQKKYYNAMKKLGSKKPQKPIPRPGNKIQGCIFDLVTNQAFDISIMVLICLNMVTMMVEKEGQSQHMTEVLYWINVVFIILFTGECVLKLISLRHYYFTVGWNIFDFVVVIISIVGMFLADLIETYFVSPTLFRVIRLARIGRILRLVKGAKGIRTLLFALMMSLPALFNIGLLLFLVMFIYAIFGMSNFAYVKKEDGINDMFNFETFGNSMICLFQITTSAGWDGLLAPILNSKPPDCDPKKVHPGSSVEGDCGNPSVGIFYFVSYIIISFLVVVNMYIAVILENFSVATEESTEPLSEDDFEMFYEVWEKFDPDATQFIEFSKLSDFAAALDPPLLIAKPNKVQLIAMDLPMVSGDRIHCLDILFAFTKRVLGESGEMDSLRSQMEERFMSANPSKVSYEPITTTLKRKQEDVSATVIQRAYRRYRLRQNVKNISSIYIKDGDRDDDLLNKKDMAFDNVNENSSPEKTDATSSTTSPPSYDSVTKPDKEKYEQDRTEKEDKGKDSKESKK

SEQ ID NO: 19 - protein, 2012 aa, Artificial Sequence
  huNav157 chimera 14
MANFLLPRGTSSFRRFTRESLAAIEKRMAEKQARGSTTLQESREGLPEEEAPRPQLDLQASKKLPDLYGNPPQELIGEPLEDLDPFYSTQKTFIVLNKGKTIFRFSATNALYVLSPFHPIRRAAVKILVHSLFSMLIMCTILTNCIFMTMNNPPDWTKNVEYTFTGIYTFESLVKILARGFCLHAFTFLRDPWNWLDFVVIVFAYLTEFVNLGNVSALRTFRVLRALKTISVIPGLKTIVGALIQSVKKLADVMILTVFCLSVFALIGLQLFMGNLKHKCFRNSLENNETLESIMNTLESEEDFRKYFYYLEGSKDALLCGFSTDSGQCPEGYTCVKIGRNPDYGYTSFDTFSWAFLALFRLMTQDYWENLYQQTLRAAGKTYMIFFVVVIFLGSFYLINLILAVVAMAYEEQNQATIAETEEKEKRFQEAMEMLKKEHEALTIRGVDTVSRSSLEMSPLAPVNSHERRSKRRKRMSSGTEECGEDRLPKSDSEDGPRAMNHLSLTRGLSRTSMKPRSSRGSIFTFRRRDLGSEADFADDENSTAGESESHHTSLLVPWPLRRTSAQGQPSPGTSAPGHALHGKKNSTVDCNGVVSLLGAGDPEATSPGSHLLRPVMLEHPPDTTTPSEEPGGPQMLTSQAPCVDGFEEPGARQRALSAVSVLTSALEELEESRHKCPPCWNRLAQRYLIWECCPLWMSIKQGVKFIVMDPFVDLAITICIVLNTLFMAMEHHPMTEEFKNVLAIGNLVFTGIFAAEMVLKLIAMDPYYYFQQGWNIFDSLIVTLSLVELFLADVEGLSVLRSFRLLRVFKLAKSWPTLNTLIKIIGNSVGALGNLTLVLAIIVFIFAVVGMQLFGKSYKECVCKINDDCTLPRWHMNDFFHSFLIVFRVLCGEWIETMWDCMEVAGQAMCLIVYMMVMVIGNLVVLNLFLALLLSSFSADNLTAPDEDREMNNLQLALARIQRGLRFVKRTTWDFCCGLLRQRPQKPAALAAQGQLPSCIATPYSPPPPETEKVPPTRKETRFEEGEQPGQGTPGDPEPVCVPIAVAESDTDDQEEDEENSLGTEEESSKQESQPVSGGPEAPPDSRTWSQVSATASSEAEASASQADWRQQWKAEPQAPGCGETPEDSCSEGSTADMTNTAELLEQIPDLGQDVKDPEDCFTEGCVRRCPCCAVDTTQAPGKVWWRLRKTCYHIVEHSWFESFIVLMILLSSGALAFEDIYIERKKTIKIILEYADKIFTYIFILEMLLKWIAYGYKKYFTNAWCWLDFLIVDVSLVTLVANTLGYSDLGPIKSLRTLRALRPLRALSRFEGMRVVVNALVGAIPSIMNVLLVCLIFWLIFSIMGVNLFAGKFYECINTTDGSRFPASQVPNRSECFALMNVSQNVRWKNLKVNFDNVGLGYLSLLQVATFKGWTIIMYAAVDSVNVDKQPKYEYSLYMYIYFVVFIIFGSFFTLNLFIGVIIDNFNQQKKKLGGQDIFMTEEQKKYYNAMKKLGSKKPQKPIPRPLNKYQGFIFDLVTNQAFDISIMVLICLNMVTMMVEKEGQSQHMTEVLYWINVVFIILFTGECVLKLISLRHYYFTVGWNIFDFVVVIISIVGMFLADLIETYFVSPTLFRVIRLARIGRILRLVKGAKGIRTLLFALMMSLPALFNIGLLLFLVMFIYAIFGMSNFAYVKKEDGINDMFNFETFGNSMICLFQITTSAGWDGLLAPILNSKPPDCDPKKVHPGSSVEGDCGNPSVGIFYFVSYIIISFLVVVNMYIAVILENFSVATEESTEPLSEDDFDMFYEIWEKFDPEATQFIEYSVLSDFADALSEPLRIAKPNQISLINMDLPMVSGDRIHCMDILFAFTKRVLGESGEMDALKIQMEEKFMAANPSKISYEPITTTLRRKHEEVSAMVIQRAFRRHLLQRSLKHASFLFRQQAGSGLSEEDAPEREGLIAYVMSENFSRPLGPPSSSSISSTSFPPSYDSVTRATSDNLQVRGSDYSHSEDLADFPPSPDRDRESIV

SEQ ID NO: 20 - protein, 2729 aa, Artificial Sequence
  huNav157 chimera 14-beta1-beta2-beta3 viral P2A
MANFLLPRGTSSFRRFTRESLAAIEKRMAEKQARGSTTLQESREGLPEEEAPRPQLDLQASKKLPDLYGNPPQELIGEPLEDLDPFYSTQKTFIVLNKGKTIFRFSATNALYVLSPFHPIRRAAVKILVHSLFSMLIMCTILTNCIFMTMNNPPDWTKNVEYTFTGIYTFESLVKILARGFCLHAFTFLRDPWNWLDFVVIVFAYLTEFVNLGNVSALRTFRVLRALKTISVIPGLKTIVGALIQSVKKLADVMILTVFCLSVFALIGLQLFMGNLKHKCFRNSLENNETLESIMNTLESEEDFRKYFYYLEGSKDALLCGFSTDSGQCPEGYTCVKIGRNPDYGYTSFDTFSWAFLALFRLMTQDYWENLYQQTLRAAGKTYMIFFVVVIFLGSFYLINLILAVVAMAYEEQNQATIAETEEKEKRFQEAMEMLKKEHEALTIRGVDTVSRSSLEMSPLAPVNSHERRSKRRKRMSSGTEECGEDRLPKSDSEDGPRAMNHLSLTRGLSRTSMKPRSSRGSIFTFRRRDLGSEADFADDENSTAGESESHHTSLLVPWPLRRTSAQGQPSPGTSAPGHALHGKKNSTVDCNGVVSLLGAGDPEATSPGSHLLRPVMLEHPPDTTTPSEEPGGPQMLTSQAPCVDGFEEPGARQRALSAVSVLTSALEELEESRHKCPPCWNRLAQRYLIWECCPLWMSIKQGVKFIVMDPFVDLAITICIVLNTLFMAMEHHPMTEEFKNVLAIGNLVFTGIFAAEMVLKLIAMDPYYYFQQGWNIFDSLIVTLSLVELFLADVEGLSVLRSFRLLRVFKLAKSWPTLNTLIKIIGNSVGALGNLTLVLAIIVFIFAVVGMQLFGKSYKECVCKINDDCTLPRWHMNDFFHSFLIVFRVLCGEWIETMWDCMEVAGQAMCLIVYMMVMVIGNLVVLNLFLALLLSSFSADNLTAPDEDREMNNLQLALARIQRGLRFVKRTTWDFCCGLLRQRPQKPAALAAQGQLPSCIATPYSPPPPETEKVPPTRKETRFEEGEQPGQGTPGDPEPVCVPIAVAESDTDDQEEDEENSLGTEEESSKQESQPVSGGPEAPPDSRTWSQVSATASSEAEASASQADWRQQWKAEPQAPGCGETPEDSCSEGSTADMTNTAELLEQIPDLGQDVKDPEDCFTEGCVRRCPCCAVDTTQAPGKVWWRLRKTCYHIVEHSWFESFIVLMILLSSGALAFEDIYIERKKTIKIILEYADKIFTYIFILEMLLKWIAYGYKKYFTNAWCWLDFLIVDVSLVTLVANTLGYSDLGPIKSLRTLRALRPLRALSRFEGMRVVVNALVGAIPSIMNVLLVCLIFWLIFSIMGVNLFAGKFYECINTTDGSRFPASQVPNRSECFALMNVSQNVRWKNLKVNFDNVGLGYLSLLQVATFKGWTIIMYAAVDSVNVDKQPKYEYSLYMYIYFVVFIIFGSFFTLNLFIGVIIDNFNQQKKKLGGQDIFMTEEQKKYYNAMKKLGSKKPQKPIPRPLNKYQGFIFDLVTNQAFDISIMVLICLNMVTMMVEKEGQSQHMTEVLYWINVVFIILFTGECVLKLISLRHYYFTVGWNIFDFVVVIISIVGMFLADLIETYFVSPTLFRVIRLARIGRILRLVKGAKGIRTLLFALMMSLPALFNIGLLLFLVMFIYAIFGMSNFAYVKKEDGINDMFNFETFGNSMICLFQITTSAGWDGLLAPILNSKPPDCDPKKVHPGSSVEGDCGNPSVGIFYFVSYIIISFLVVVNMYIAVILENFSVATEESTEPLSEDDFDMFYEIWEKFDPEATQFIEYSVLSDFADALSEPLRIAKPNQISLINMDLPMVSGDRIHCMDILFAFTKRVLGESGEMDALKIQMEEKFMAANPSKISYEPITTTLRRKHEEVSAMVIQRAFRRHLLQRSLKHASFLFRQQAGSGLSEEDAPEREGLIAYVMSENFSRPLGPPSSSSISSTSFPPSYDSVTRATSDNLQVRGSDYSHSEDLADFPPSPDRDRESIVSGRGSGATNFSLLKQAGDVEENPGPMGRLLALVVGAALVSSACGGCVEVDSETEAVYGMTFKILCISCKRRSETNAETFTEWTFRQKGTEEFVKILRYENEVLQLEEDERFEGRVVWNGSRGTKDLQDLSIFITNVTYNHSGDYECHVYRLLFFENYEHNTSVVKKIHIEVVDKANRDMASIVSEIMMYVLIVVLTIWLVAEMIYCYKKIAAATETAAQENASEYLAITSESKENCTGVQVAEGSGATNFSLLKQAGDVEENPGPMHRDAWLPRPAFSLTGLSLFFSLVPPGRSMEVTVPATLNVLNGSDARLPCTFNSCYTVNHKQFSLNWTYQECNNCSEEMFLQFRMKIINLKLERFQDRVEFSGNPSKYDVSVMLRNVQPEDEGIYNCYIMNPPDRHRGHGKIHLQVLMEEPPERDSTVAVIVGASVGGFLAVVILVLMVVKCVRRKKEQKLSTDDLKTEEEGKTDGEGNPDDGAKGSGATNFSLLKQAGDVEENPGPMPAFNRLFPLASLVLIYWVSVCFPVCVEVPSETEAVQGNPMKLRCISCMKREEVEATTVVEWFYRPEGGKDFLIYEYRNGHQEVESPFQGRLQWNGSKDLQDVSITVLNVTLNDSGLYTCNVSREFEFEAHRPFVKTTRLIPLRVTEEAGEDFTSVVSEIMMYILLVFLTLWLLIEMIYCYRKVSKAEEAAQENASDYLAIPSENKENSAVPVEE

SEQ ID NO: 21 - protein, 692 aa, Artificial Sequence
  beta1-beta2-beta3 viral P2A
MGRLLALVVGAALVSSACGGCVEVDSETEAVYGMTFKILCISCKRRSETNAETFTEWTFRQKGTEEFVKILRYENEVLQLEEDERFEGRVVWNGSRGTKDLQDLSIFITNVTYNHSGDYECHVYRLLFFENYEHNTSVVKKIHIEVVDKANRDMASIVSEIMMYVLIVVLTIWLVAEMIYCYKKIAAATETAAQENASEYLAITSESKENCTGVQVAEGSGATNFSLLKQAGDVEENPGPMHRDAWLPRPAFSLTGLSLFFSLVPPGRSMEVTVPATLNVLNGSDARLPCTFNSCYTVNHKQFSLNWTYQECNNCSEEMFLQFRMKIINLKLERFQDRVEFSGNPSKYDVSVMLRNVQPEDEGIYNCYIMNPPDRHRGHGKIHLQVLMEEPPERDSTVAVIVGASVGGFLAVVILVLMVVKCVRRKKEQKLSTDDLKTEEEGKTDGEGNPDDGAKGSGATNFSLLKQAGDVEENPGPMPAFNRLFPLASLVLIYWVSVCFPVCVEVPSETEAVQGNPMKLRCISCMKREEVEATTVVEWFYRPEGGKDFLIYEYRNGHQEVESPFQGRLQWNGSKDLQDVSITVLNVTLNDSGLYTCNVSREFEFEAHRPFVKTTRLIPLRVTEEAGEDFTSVVSEIMMYILLVFLTLWLLIEMIYCYRKVSKAEEAAQENASDYLAIPSENKENSAVPVEE

SEQ ID NO: 22 - protein, 2732 aa, Artificial Sequence
  huNav1.5-b1-beta2-beta3 viral P2A
MANFLLPRGTSSFRRFTRESLAAIEKRMAEKQARGSTTLQESREGLPEEEAPRPQLDLQASKKLPDLYGNPPQELIGEPLEDLDPFYSTQKTFIVLNKGKTIFRFSATNALYVLSPFHPIRRAAVKILVHSLFNMLIMCTILTNCVFMAQHDPPPWTKYVEYTFTAIYTFESLVKILARGFCLHAFTFLRDPWNWLDFSVIIMAYTTEFVDLGNVSALRTFRVLRALKTISVISGLKTIVGALIQSVKKLADVMVLTVFCLSVFALIGLQLFMGNLRHKCVRNFTALNGTNGSVEADGLVWESLDLYLSDPENYLLKNGTSDVLLCGNSSDAGTCPEGYRCLKAGENPDHGYTSFDSFAWAFLALFRLMTQDCWERLYQQTLRSAGKIYMIFFMLVIFLGSFYLVNLILAVVAMAYEEQNQATIAETEEKEKRFQEAMEMLKKEHEALTIRGVDTVSRSSLEMSPLAPVNSHERRSKRRKRMSSGTEECGEDRLPKSDSEDGPRAMNHLSLTRGLSRTSMKPRSSRGSIFTFRRRDLGSEADFADDENSTAGESESHHTSLLVPWPLRRTSAQGQPSPGTSAPGHALHGKKNSTVDCNGVVSLLGAGDPEATSPGSHLLRPVMLEHPPDTTTPSEEPGGPQMLTSQAPCVDGFEEPGARQRALSAVSVLTSALEELEESRHKCPPCWNRLAQRYLIWECCPLWMSIKQGVKLVVMDPFTDLTITMCIVLNTLFMALEHYNMTSEFEEMLQVGNLVFTGIFTAEMTFKIIALDPYYYFQQGWNIFDSIIVILSLMELGLSRMSNLSVLRSFRLLRVFKLAKSWPTLNTLIKIIGNSVGALGNLTLVLAIIVFIFAVVGMQLFGKNYSELRDSDSGLLPRWHMMDFFHAFLIIFRILCGEWIETMWDCMEVSGQSLCLLVFLLVMVIGNLVVLNLFLALLLSSFSADNLTAPDEDREMNNLQLALARIQRGLRFVKRTTWDFCCGLLRQRPQKPAALAAQGQLPSCIATPYSPPPPETEKVPPTRKETRFEEGEQPGQGTPGDPEPVCVPIAVAESDTDDQEEDEENSLGTEEESSKQESQPVSGGPEAPPDSRTWSQVSATASSEAEASASQADWRQQWKAEPQAPGCGETPEDSCSEGSTADMTNTAELLEQIPDLGQDVKDPEDCFTEGCVRRCPCCAVDTTQAPGKVWWRLRKTCYHIVEHSWFETFIIFMILLSSGALAFEDIYLEERKTIKVLLEYADKMFTYVFVLEMLLKWVAYGFKKYFTNAWCWLDFLIVDVSLVSLVANTLGFAEMGPIKSLRTLRALRPLRALSRFEGMRVVVNALVGAIPSIMNVLLVCLIFWLIFSIMGVNLFAGKFGRCINQTEGDLPLNYTIVNNKSQCESLNLTGELYWTKVKVNFDNVGAGYLALLQVATFKGWMDIMYAAVDSRGYEEQPQWEYNLYMYIYFVIFIIFGSFFTLNLFIGVIIDNFNQQKKKLGGQDIFMTEEQKKYYNAMKKLGSKKPQKPIPRPLNKYQGFIFDIVTKQAFDVTIMFLICLNMVTMMVETDDQSPEKINILAKINLLFVAIFTGECIVKLAALRHYYFTNSWNIFDFVVVILSIVGTVLSDIIQKYFFSPTLFRVIRLARIGRILRLIRGAKGIRTLLFALMMSLPALFNIGLLLFLVMFIYSIFGMANFAYVKWEAGIDDMFNFQTFANSMLCLFQITTSAGWDGLLSPILNTGPPYCDPTLPNSNGSRGDCGSPAVGILFFTTYIIISFLIVVNMYIAIILENFSVATEESTEPLSEDDFDMFYEIWEKFDPEATQFIEYSVLSDFADALSEPLRIAKPNQISLINMDLPMVSGDRIHCMDILFAFTKRVLGESGEMDALKIQMEEKFMAANPSKISYEPITTTLRRKHEEVSAMVIQRAFRRHLLQRSLKHASFLFRQQAGSGLSEEDAPEREGLIAYVMSENFSRPLGPPSSSSISSTSFPPSYDSVTRATSDNLQVRGSDYSHSEDLADFPPSPDRDRESIVSGRGSGATNFSLLKQAGDVEENPGPMGRLLALVVGAALVSSACGGCVEVDSETEAVYGMTFKILCISCKRRSETNAETFTEWTFRQKGTEEFVKILRYENEVLQLEEDERFEGRVVWNGSRGTKDLQDLSIFITNVTYNHSGDYECHVYRLLFFENYEHNTSVVKKIHIEVVDKANRDMASIVSEIMMYVLIVVLTIWLVAEMIYCYKKIAAATETAAQENASEYLAITSESKENCTGVQVAEGSGATNFSLLKQAGDVEENPGPMHRDAWLPRPAFSLTGLSLFFSLVPPGRSMEVTVPATLNVLNGSDARLPCTFNSCYTVNHKQFSLNWTYQECNNCSEEMFLQFRMKIINLKLERFQDRVEFSGNPSKYDVSVMLRNVQPEDEGIYNCYIMNPPDRHRGHGKIHLQVLMEEPPERDSTVAVIVGASVGGFLAVVILVLMVVKCVRRKKEQKLSTDDLKTEEEGKTDGEGNPDDGAKGSGATNFSLLKQAGDVEENPGPMPAFNRLFPLASLVLIYWVSVCFPVCVEVPSETEAVQGNPMKLRCISCMKREEVEATTVVEWFYRPEGGKDFLIYEYRNGHQEVESPFQGRLQWNGSKDLQDVSITVLNVTLNDSGLYTCNVSREFEFEAHRPFVKTTRLIPLRVTEEAGEDFTSVVSEIMMYILLVFLTLWLLIEMIYCYRKVSKAEEAAQENASDYLAIPSENKENSAVPVEE

SEQ ID NO: 23 - protein, 2009 aa, Artificial Sequence
  huNav1.1 (alpha subunit)
MEQTVLVPPGPDSFNFFTRESLAAIERRIAEEKAKNPKPDKKDDDENGPKPNSDLEAGKNLPFIYGDIPPEMVSEPLEDLDPYYINKKTFIVLNKGKAIFRFSATSALYILTPFNPLRKIAIKILVHSLFSMLIMCTILTNCVFMTMSNPPDWTKNVEYTFTGIYTFESLIKIIARGFCLEDFTFLRDPWNWLDFTVITFAYVTEFVDLGNVSALRTFRVLRALKTISVIPGLKTIVGALIQSVKKLSDVMILTVFCLSVFALIGLQLFMGNLRNKCIQWPPTNASLEEHSIEKNITVNYNGTLINETVFEFDWKSYIQDSRYHYFLEGFLDALLCGNSSDAGQCPEGYMCVKAGRNPNYGYTSFDTFSWAFLSLFRLMTQDFWENLYQLTLRAAGKTYMIFFVLVIFLGSFYLINLILAVVAMAYEEQNQATLEEAEQKEAEFQQMIEQLKKQQEAAQQAATATASEHSREPSAAGRLSDSSSEASKLSSKSAKERRNRRKKRKQKEQSGGEEKDEDEFQKSESEDSIRRKGFRFSIEGNRLTYEKRYSSPHQSLLSIRGSLFSPRRNSRTSLFSFRGRAKDVGSENDFADDEHSTFEDNESRRDSLFVPRRHGERRNSNLSQTSRSSRMLAVFPANGKMHSTVDCNGVVSLVGGPSVPTSPVGQLLPEVIIDKPATDDNGTTTETEMRKRRSSSFHVSMDFLEDPSQRQRAMSIASILTNTVEELEESRQKCPPCWYKFSNIFLIWDCSPYWLKVKHVVNLVVMDPFVDLAITICIVLNTLFMAMEHYPMTDHFNNVLTVGNLVFTGIFTAEMFLKIIAMDPYYYFQEGWNIFDGFIVTLSLVELGLANVEGLSVLRSFRLLRVFKLAKSWPTLNMLIKIIGNSVGALGNLTLVLAIIVFIFAVVGMQLFGKSYKDCVCKIASDCQLPRWHMNDFFHSFLIVFRVLCGEWIETMWDCMEVAGQAMCLTVFMMVMVIGNLVVLNLFLALLLSSFSADNLAATDDDNEMNNLQIAVDRMHKGVAYVKRKIYEFIQQSFIRKQKILDEIKPLDDLNNKKDSCMSNHTAEIGKDLDYLKDVNGTTSGIGTGSSVEKYIIDESDYMSFINNPSLTVTVPIAVGESDFENLNTEDFSSESDLEESKEKLNESSSSSEGSTVDIGAPVEEQPVVEPEETLEPEACFTEGCVQRFKCCQINVEEGRGKQWWNLRRTCFRIVEHNWFETFIVFMILLSSGALAFEDIYIDQRKTIKTMLEYADKVFTYIFILEMLLKWVAYGYQTYFTNAWCWLDFLIVDVSLVSLTANALGYSELGAIKSLRTLRALRPLRALSRFEGMRVVVNALLGAIPSIMNVLLVCLIFWLIFSIMGVNLFAGKFYHCINTTTGDRFDIEDVNNHTDCLKLIERNETARWKNVKVNFDNVGFGYLSLLQVATFKGWMDIMYAAVDSRNVELQPKYEESLYMYLYFVIFIIFGSFFTLNLFIGVIIDNFNQQKKKFGGQDIFMTEEQKKYYNAMKKLGSKKPQKPIPRPGNKFQGMVFDFVTRQVFDISIMILICLNMVTMMVETDDQSEYVTTILSRINLVFIVLFTGECVLKLISLRHYYFTIGWNIFDFVVVILSIVGMFLAELIEKYFVSPTLFRVIRLARIGRILRLIKGAKGIRTLLFALMMSLPALFNIGLLLFLVMFIYAIFGMSNFAYVKREVGIDDMFNFETFGNSMICLFQITTSAGWDGLLAPILNSKPPDCDPNKVNPGSSVKGDCGNPSVGIFFFVSYIIISFLVVVNMYIAVILENFSVATEESAEPLSEDDFEMFYEVWEKFDPDATQFMEFEKLSQFAAALEPPLNLPQPNKLQLIAMDLPMVSGDRIHCLDILFAFTKRVLGESGEMDALRIQMEERFMASNPSKVSYQPITTTLKRKQEEVSAVIIQRAYRRHLLKRTVKQASFTYNKNKIKGGANLLIKEDMIIDRINENSITEKTDLTMSTAACPPSYDRVTKPIVEKHEQEGKDEKAKGK

SEQ ID NO: 24 - protein, 2005 aa, Artificial Sequence
  huNav1.2 (alpha subunit)
MAQSVLVPPGPDSFRFFTRESLAAIEQRIAEEKAKRPKQERKDEDDENGPKPNSDLEAGKSLPFIYGDIPPEMVSVPLEDLDPYYINKKTFIVLNKGKAISRFSATPALYILTPFNPIRKLAIKILVHSLFNMLIMCTILTNCVFMTMSNPPDWTKNVEYTFTGIYTFESLIKILARGFCLEDFTFLRDPWNWLDFTVITFAYVTEFVDLGNVSALRTFRVLRALKTISVIPGLKTIVGALIQSVKKLSDVMILTVFCLSVFALIGLQLFMGNLRNKCLQWPPDNSSFEINITSFFNNSLDGNGTTFNRTVSIFNWDEYIEDKSHFYFLEGQNDALLCGNSSDAGQCPEGYICVKAGRNPNYGYTSFDTFSWAFLSLFRLMTQDFWENLYQLTLRAAGKTYMIFFVLVIFLGSFYLINLILAVVAMAYEEQNQATLEEAEQKEAEFQQMLEQLKKQQEEAQAAAAAASAESRDFSGAGGIGVFSESSSVASKLSSKSEKELKNRRKKKKQKEQSGEEEKNDRVRKSESEDSIRRKGFRFSLEGSRLTYEKRFSSPHQSLLSIRGSLFSPRRNSRASLFSFRGRAKDIGSENDFADDEHSTFEDNDSRRDSLFVPHRHGERRHSNVSQASRASRVLPILPMNGKMHSAVDCNGVVSLVGGPSTLTSAGQLLPEGTTTETEIRKRRSSSYHVSMDLLEDPTSRQRAMSIASILTNTMEELEESRQKCPPCWYKFANMCLIWDCCKPWLKVKHLVNLVVMDPFVDLAITICIVLNTLFMAMEHYPMTEQFSSVLSVGNLVFTGIFTAEMFLKIIAMDPYYYFQEGWNIFDGFIVSLSLMELGLANVEGLSVLRSFRLLRVFKLAKSWPTLNMLIKIIGNSVGALGNLTLVLAIIVFIFAVVGMQLFGKSYKECVCKISNDCELPRWHMHDFFHSFLIVFRVLCGEWIETMWDCMEVAGQTMCLTVFMMVMVIGNLVVLNLFLALLLSSFSSDNLAATDDDNEMNNLQIAVGRMQKGIDFVKRKIREFIQKAFVRKQKALDEIKPLEDLNNKKDSCISNHTTIEIGKDLNYLKDGNGTTSGIGSSVEKYVVDESDYMSFINNPSLTVTVPIAVGESDFENLNTEEFSSESDMEESKEKLNATSSSEGSTVDIGAPAEGEQPEVEPEESLEPEACFTEDCVRKFKCCQISIEEGKGKLWWNLRKTCYKIVEHNWFETFIVFMILLSSGALAFEDIYIEQRKTIKTMLEYADKVFTYIFILEMLLKWVAYGFQVYFTNAWCWLDFLIVDVSLVSLTANALGYSELGAIKSLRTLRALRPLRALSRFEGMRVVVNALLGAIPSIMNVLLVCLIFWLIFSIMGVNLFAGKFYHCINYTTGEMFDVSVVNNYSECKALIESNQTARWKNVKVNFDNVGLGYLSLLQVATFKGWMDIMYAAVDSRNVELQPKYEDNLYMYLYFVIFIIFGSFFTLNLFIGVIIDNFNQQKKKFGGQDIFMTEEQKKYYNAMKKLGSKKPQKPIPRPANKFQGMVFDFVTKQVFDISIMILICLNMVTMMVETDDQSQEMTNILYWINLVFIVLFTGECVLKLISLRYYYFTIGWNIFDFVVVILSIVGMFLAELIEKYFVSPTLFRVIRLARIGRILRLIKGAKGIRTLLFALMMSLPALFNIGLLLFLVMFIYAIFGMSNFAYVKREVGIDDMFNFETFGNSMICLFQITTSAGWDGLLAPILNSGPPDCDPDKDHPGSSVKGDCGNPSVGIFFFVSYIIISFLVVVNMYIAVILENFSVATEESAEPLSEDDFEMFYEVWEKFDPDATQFIEFAKLSDFADALDPPLLIAKPNKVQLIAMDLPMVSGDRIHCLDILFAFTKRVLGESGEMDALRIQMEERFMASNPSKVSYEPITTTLKRKQEEVSAIIIQRAYRRYLLKQKVKKVSSIYKKDKGKECDGTPIKEDTLIDKLNENSTPEKTDMTPSTTSPPSYDSVTKPEKEKFEKDKSEKEDKGKDIRESKK

SEQ ID NO: 25 - protein, 2000 aa, Artificial Sequence
  huNav1.3 (alpha subunit)
MAQALLVPPGPESFRLFTRESLAAIEKRAAEEKAKKPKKEQDNDDENKPKPNSDLEAGKNLPFIYGDIPPEMVSEPLEDLDPYYINKKTFIVMNKGKAIFRFSATSALYILTPLNPVRKIAIKILVHSLFSMLIMCTILTNCVFMTLSNPPDWTKNVEYTFTGIYTFESLIKILARGFCLEDFTFLRDPWNWLDFSVIVMAYVTEFVSLGNVSALRTFRVLRALKTISVIPGLKTIVGALIQSVKKLSDVMILTVFCLSVFALIGLQLFMGNLRNKCLQWPPSDSAFETNTTSYFNGTMDSNGTFVNVTMSTFNWKDYIGDDSHFYVLDGQKDPLLCGNGSDAGQCPEGYICVKAGRNPNYGYTSFDTFSWAFLSLFRLMTQDYWENLYQLTLRAAGKTYMIFFVLVIFLGSFYLVNLILAVVAMAYEEQNQATLEEAEQKEAEFQQMLEQLKKQQEEAQAVAAASAASRDFSGIGGLGELLESSSEASKLSSKSAKEWRNRRKKRRQREHLEGNNKGERDSFPKSESEDSVKRSSFLFSMDGNRLTSDKKFCSPHQSLLSIRGSLFSPRRNSKTSIFSFRGRAKDVGSENDFADDEHSTFEDSESRRDSLFVPHRHGERRNSNVSQASMSSRMVPGLPANGKMHSTVDCNGVVSLVGGPSALTSPTGQLPPEGTTTETEVRKRRLSSYQISMEMLEDSSGRQRAVSIASILTNTMEELEESRQKCPPCWYRFANVFLIWDCCDAWLKVKHLVNLIVMDPFVDLAITICIVLNTLFMAMEHYPMTEQFSSVLTVGNLVFTGIFTAEMVLKIIAMDPYYYFQEGWNIFDGIIVSLSLMELGLSNVEGLSVLRSFRLLRVFKLAKSWPTLNMLIKIIGNSVGALGNLTLVLAIIVFIFAVVGMQLFGKSYKECVCKINDDCTLPRWHMNDFFHSFLIVFRVLCGEWIETMWDCMEVAGQTMCLIVFMLVMVIGNLVVLNLFLALLLSSFSSDNLAATDDDNEMNNLQIAVGRMQKGIDYVKNKMRECFQKAFFRKPKVIEIHEGNKIDSCMSNNTGIEISKELNYLRDGNGTTSGVGTGSSVEKYVIDENDYMSFINNPSLTVTVPIAVGESDFENLNTEEFSSESELEESKEKLNATSSSEGSTVDVVLPREGEQAETEPEEDLKPEACFTEGCIKKFPFCQVSTEEGKGKIWWNLRKTCYSIVEHNWFETFIVFMILLSSGALAFEDIYIEQRKTIKTMLEYADKVFTYIFILEMLLKWVAYGFQTYFTNAWCWLDFLIVDVSLVSLVANALGYSELGAIKSLRTLRALRPLRALSRFEGMRVVVNALVGAIPSIMNVLLVCLIFWLIFSIMGVNLFAGKFYHCVNMTTGNMFDISDVNNLSDCQALGKQARWKNVKVNFDNVGAGYLALLQVATFKGWMDIMYAAVDSRDVKLQPVYEENLYMYLYFVIFIIFGSFFTLNLFIGVIIDNFNQQKKKFGGQDIFMTEEQKKYYNAMKKLGSKKPQKPIPRPANKFQGMVFDFVTRQVFDISIMILICLNMVTMMVETDDQGKYMTLVLSRINLVFIVLFTGEFVLKLVSLRHYYFTIGWNIFDFVVVILSIVGMFLAEMIEKYFVSPTLFRVIRLARIGRILRLIKGAKGIRTLLFALMMSLPALFNIGLLLFLVMFIYAIFGMSNFAYVKKEAGIDDMFNFETFGNSMICLFQITTSAGWDGLLAPILNSAPPDCDPDTIHPGSSVKGDCGNPSVGIFFFVSYIIISFLVVVNMYIAVILENFSVATEESAEPLSEDDFEMFYEVWEKFDPDATQFIEFSKLSDFAAALDPPLLIAKPNKVQLIAMDLPMVSGDRIHCLDILFAFTKRVLGESGEMDALRIQMEDRFMASNPSKVSYEPITTTLKRKQEEVSAAIIQRNFRCYLLKQRLKNISSNYNKEAIKGRIDLPIKQDMIIDKLNGNSTPEKTDGSSSTTSPPSYDSVTKPDKEKFEKDKPEKESKGKEVRENQK

SEQ ID NO: 26 - protein, 1836 aa, Artificial Sequence
  huNav1.4 (alpha subunit)
MARPSLCTLVPLGPECLRPFTRESLAAIEQRAVEEEARLQRNKQMEIEEPERKPRSDLEAGKNLPMIYGDPPPEVIGIPLEDLDPYYSNKKTFIVLNKGKAIFRFSATPALYLLSPFSVVRRGAIKVLIHALFSMFIMITILTNCVFMTMSDPPPWSKNVEYTFTGIYTFESLIKILARGFCVDDFTFLRDPWNWLDFSVIMMAYLTEFVDLGNISALRTFRVLRALKTITVIPGLKTIVGALIQSVKKLSDVMILTVFCLSVFALVGLQLFMGNLRQKCVRWPPPFNDTNTTWYSNDTWYGNDTWYGNEMWYGNDSWYANDTWNSHASWATNDTFDWDAYISDEGNFYFLEGSNDALLCGNSSDAGHCPEGYECIKTGRNPNYGYTSYDTFSWAFLALFRLMTQDYWENLFQLTLRAAGKTYMIFFVVIIFLGSFYLINLILAVVAMAYAEQNEATLAEDKEKEEEFQQMLEKFKKHQEELEKAKAAQALEGGEADGDPAHGKDCNGSLDTSQGEKGAPRQSSSGDSGISDAMEELEEAHQKCPPWWYKCAHKVLIWNCCAPWLKFKNIIHLIVMDPFVDLGITICIVLNTLFMAMEHYPMTEHFDNVLTVGNLVFTGIFTAEMVLKLIAMDPYEYFQQGWNIFDSIIVTLSLVELGLANVQGLSVLRSFRLLRVFKLAKSWPTLNMLIKIIGNSVGALGNLTLVLAIIVFIFAVVGMQLFGKSYKECVCKIALDCNLPRWHMHDFFHSFLIVFRILCGEWIETMWDCMEVAGQAMCLTVFLMVMVIGNLVVLNLFLALLLSSFSADSLAASDEDGEMNNLQIAIGRIKLGIGFAKAFLLGLLHGKILSPKDIMLSLGEADGAGEAGEAGETAPEDEKKEPPEEDLKKDNHILNHMGLADGPPSSLELDHLNFINNPYLTIQVPIASEESDLEMPTEEETDTFSEPEDSKKPPQPLYDGNSSVCSTADYKPPEEDPEEQAEENPEGEQPEECFTEACVQRWPCLYVDISQGRGKKWWTLRRACFKIVEHNWFETFIVFMILLSSGALAFEDIYIEQRRVIRTILEYADKVFTYIFIMEMLLKWVAYGFKVYFTNAWCWLDFLIVDVSIISLVANWLGYSELGPIKSLRTLRALRPLRALSRFEGMRVVVNALLGAIPSIMNVLLVCLIFWLIFSIMGVNLFAGKFYYCINTTTSERFDISEVNNKSECESLMHTGQVRWLNVKVNYDNVGLGYLSLLQVATFKGWMDIMYAAVDSREKEEQPQYEVNLYMYLYFVIFIIFGSFFTLNLFIGVIIDNFNQQKKKLGGKDIFMTEEQKKYYNAMKKLGSKKPQKPIPRPQNKIQGMVYDLVTKQAFDITIMILICLNMVTMMVETDNQSQLKVDILYNINMIFIIIFTGECVLKMLALRQYYFTVGWNIFDFVVVILSIVGLALSDLIQKYFVSPTLFRVIRLARIGRVLRLIRGAKGIRTLLFALMMSLPALFNIGLLLFLVMFIYSIFGMSNFAYVKKESGIDDMFNFETFGNSIICLFEITTSAGWDGLLNPILNSGPPDCDPNLENPGTSVKGDCGNPSIGICFFCSYIIISFLIVVNMYIAIILENFNVATEESSEPLGEDDFEMFYETWEKFDPDATQFIAYSRLSDFVDTLQEPLRIAKPNKIKLITLDLPMVPGDKIHCLDILFALTKEVLGDSGEMDALKQTMEEKFMAANPSKVSYEPITTTLKRKHEEVCAIKIQRAYRRHLLQRSMKQASYMYRHSHDGSGDDAPEKEGLLANTMSKMYGHENGNSSSPSPEEKGEAGDAGPTMGLMPISPSDTAWPPAPPPGQTVRPGVKESLV

SEQ ID NO: 27 - protein, 1983 aa, Artificial Sequence [sequence omitted]

SEQ ID NO: 28 - protein, 1980 aa, Artificial Sequence
  huNav1.6 (alpha subunit)
MAARLLAPPGPDSFKPFTPESLANIERRIAESKLKKPPKADGSHREDDEDSKPKPNSDLEAGKSLPFIYGDIPQGLVAVPLEDFDPYYLTQKTFVVLNRGKTLFRFSATPALYILSPFNLIRRIAIKILIHSVFSMIIMCTILTNCVFMTFSNPPDWSKNVEYTFTGIYTFESLVKIIARGFCIDGFTFLRDPWNWLDFSVIMMAYITEFVNLGNVSALRTFRVLRALKTISVIPGLKTIVGALIQSVKKLSDVMILTVFCLSVFALIGLQLFMGNLRNKCVVWPINFNESYLENGTKGFDWEEYINNKTNFYTVPGMLEPLLCGNSSDAGQCPEGYQCMKAGRNPNYGYTSFDTFSWAFLALFRLMTQDYWENLYQLTLRAAGKTYMIFFVLVIFVGSFYLVNLILAVVAMAYEEQNQATLEEAEQKEAEFKAMLEQLKKQQEEAQAAAMATSAGTVSEDAIEEEGEEGGGSPRSSSEISKLSSKSAKERRNRRKKRKQKELSEGEEKGDPEKVFKSESEDGMRRKAFRLPDNRIGRKFSIMNQSLLSIPGSPFLSRHNSKSSIFSFRGPGRFRDPGSENEFADDEHSTVEESEGRRDSLFIPIRARERRSSYSGYSGYSQGSRSSRIFPSLRRSVKRNSTVDCNGVVSLIGGPGSHIGGRLLPEATTEVEIKKKGPGSLLVSMDQLASYGRKDRINSIMSVVTNTLVEELEESQRKCPPCWYKFANTFLIWECHPYWIKLKEIVNLIVMDPFVDLAITICIVLNTLFMAMEHHPMTPQFEHVLAVGNLVFTGIFTAEMFLKLIAMDPYYYFQEGWNIFDGFIVSLSLMELSLADVEGLSVLRSFRLLRVFKLAKSWPTLNMLIKIIGNSVGALGNLTLVLAIIVFIFAVVGMQLFGKSYKECVCKINQDCELPRWHMHDFFHSFLIVFRVLCGEWIETMWDCMEVAGQAMCLIVFMMVMVIGNLVVLNLFLALLLSSFSADNLAATDDDGEMNNLQISVIRIKKGVAWTKLKVHAFMQAHFKQREADEVKPLDELYEKKANCIANHTGADIHRNGDFQKNGNGTTSGIGSSVEKYIIDEDHMSFINNPNLTVRVPIAVGESDFENLNTEDVSSESDPEGSKDKLDDTSSSEGSTIDIKPEVEEVPVEQPEEYLDPDACFTEGCVQRFKCCQVNIEEGLGKSWWILRKTCFLIVEHNWFETFIIFMILLSSGALAFEDIYIEQRKTIRTILEYADKVFTYIFILEMLLKWTAYGFVKFFTNAWCWLDFLIVAVSLVSLIANALGYSELGAIKSLRTLRALRPLRALSRFEGMRVVVNALVGAIPSIMNVLLVCLIFWLIFSIMGVNLFAGKYHYCFNETSEIRFEIEDVNNKTECEKLMEGNNTEIRWKNVKINFDNVGAGYLALLQVATFKGWMDIMYAAVDSRKPDEQPKYEDNIYMYIYFVIFIIFGSFFTLNLFIGVIIDNFNQQKKKFGGQDIFMTEEQKKYYNAMKKLGSKKPQKPIPRPLNKIQGIVFDFVTQQAFDIVIMMLICLNMVTMMVETDTQSKQMENILYWINLVFVIFFTCECVLKMFALRHYYFTIGWNIFDFVVVILSIVGMFLADIIEKYFVSPTLFRVIRLARIGRILRLIKGAKGIRTLLFALMMSLPALFNIGLLLFLVMFIFSIFGMSNFAYVKHEAGIDDMFNFETFGNSMICLFQITTSAGWDGLLLPILNRPPDCSLDKEHPGSGFKGDCGNPSVGIFFFVSYIIISFLIVVNMYIAIILENFSVATEESADPLSEDDFETFYEIWEKFDPDATQFIEYCKLADFADALEHPLRVPKPNTIELIAMDLPMVSGDRIHCLDILFAFTKRVLGDSGELDILRQQMEERFVASNPSKVSYEPITTTLRRKQEEVSAVVLQRAYRGHLARRGFICKKTTSNKLENGGTHREKKESTPSTASLPSYDSVTKPEKEKQQRAEEGRRERAKRQKEVRESKC

SEQ ID NO: 29 - protein, 1956 aa, Artificial Sequence
  huNav1.8 (alpha subunit)
MEFPIGSLETNNFRRFTPESLVEIEKQIAAKQGTKKAREKHREQKDQEEKPRPQLDLKACNQLPKFYGELPAELIGEPLEDLDPFYSTHRTFMVLNKGRTISRFSATRALWLFSPFNLIRRTAIKVSVHSWFSLFITVTILVNCVCMTRTDLPEKIEYVFTVIYTFEALIKILARGFCLNEFTYLRDPWNWLDFSVITLAYVGTAIDLRGISGLRTFRVLRALKTVSVIPGLKVIVGALIHSVKKLADVTILTIFCLSVFALVGLQLFKGNLKNKCVKNDMAVNETTNYSSHRKPDIYINKRGTSDPLLCGNGSDSGHCPDGYICLKTSDNPDFNYTSFDSFAWAFLSLFRLMTQDSWERLYQQTLRTSGKIYMIFFVLVIFLGSFYLVNLILAVVTMAYEEQNQATTDEIEAKEKKFQEALEMLRKEQEVLAALGIDTTSLHSHNGSPLTSKNASERRHRIKPRVSEGSTEDNKSPRSDPYNQRRMSFLGLASGKRRASHGSVFHFRSPGRDISLPEGVTDDGVFPGDHESHRGSLLLGGGAGQQGPLPRSPLPQPSNPDSRHGEDEHQPPPTSELAPGAVDVSAFDAGQKKTFLSAEYLDEPFRAQRAMSVVSIITSVLEELEESEQKCPPCLTSLSQKYLIWDCCPMWVKLKTILFGLVTDPFAELTITLCIVVNTIFMAMEHHGMSPTFEAMLQIGNIVFTIFFTAEMVFKIIAFDPYYYFQKKWNIFDCIIVTVSLLELGVAKKGSLSVLRSFRLLRVFKLAKSWPTLNTLIKIIGNSVGALGNLTIILAIIVFVFALVGKQLLGENYRNNRKNISAPHEDWPRWHMHDFFHSFLIVFRILCGEWIENMWACMEVGQKSICLILFLTVMVLGNLVVLNLFIALLLNSFSADNLTAPEDDGEVNNLQVALARIQVFGHRTKQALCSFFSRSCPFPQPKAEPELVVKLPLSSSKAENHIAANTARGSSGGLQAPRGPRDEHSDFIANPTVWVSVPIAEGESDLDDLEDDGGEDAQSFQQEVIPKGQQEQLQQVERCGDHLTPRSPGTGTSSEDLAPSLGETWKDESVPQVPAEGVDDTSSSEGSTVDCLDPEEILRKIPELADDLEEPDDCFTEGCIRHCPCCKLDTTKSPWDVGWQVRKTCYRIVEHSWFESFIIFMILLSSGSLAFEDYYLDQKPTVKALLEYTDRVFTFIFVFEMLLKWVAYGFKKYFTNAWCWLDFLIVNISLISLTAKILEYSEVAPIKALRTLRALRPLRALSRFEGMRVVVDALVGAIPSIMNVLLVCLIFWLIFSIMGVNLFAGKFWRCINYTDGEFSLVPLSIVNNKSDCKIQNSTGSFFWVNVKVNFDNVAMGYLALLQVATFKGWMDIMYAAVDSREVNMQPKWEDNVYMYLYFVIFIIFGGFFTLNLFVGVIIDNFNQQKKKLGGQDIFMTEEQKKYYNAMKKLGSKKPQKPIPRPLNKFQGFVFDIVTRQAFDITIMVLICLNMITMMVETDDQSEEKTKILGKINQFFVAVFTGECVMKMFALRQYYFTNGWNVFDFIVVVLSIASLIFSAILKSLQSYFSPTLFRVIRLARIGRILRLIRAAKGIRTLLFALMMSLPALFNIGLLLFLVMFIYSIFGMSSFPHVRWEAGIDDMFNFQTFANSMLCLFQITTSAGWDGLLSPILNTGPPYCDPNLPNSNGTRGDCGSPAVGIIFFTTYIIISFLIMVNMYIAVILENFNVATEESTEPLSEDDFDMFYETWEKFDPEATQFITFSALSDFADTLSGPLRIPKPNRNILIQMDLPLVPGDKIHCLDILFAFTKNVLGESGELDSLKANMEEKFMATNLSKSSYEPIATTLRWKQEDISATVIQKAYRSYVLHRSMALSNTPCVPRAEEEAASLPDEGFVAFTANENCVLPDKSETASATSFPPSYESVTRGLSDRVNMRTSSSIQNEDEATSMELIAPGP

SEQ ID NO: 30 - protein, 156 aa, Artificial Sequence
  F0103262B06 (parental)-FLAG-HIS6
EVQLVESGGGLVQPGGSLRLSCAGSTRTFSTYAMGWFRQAPGREREFVAHINFSGSSTRYADSVKGRFTISRDNAKNMGYLQMNSLKPEDTAVYYCAARWVAGPPRYDYEYWGQGTLVTVSSAAADYKDHDGDYKDHDIDYKDDDDKGAAHHHHHH

SEQ ID NO: 31 - protein, 160 aa, Artificial Sequence
  F0103262C02 (parental)-FLAG-HIS6
EVQLVESGGGLVQAGGSLTLSCAASGLPFGLYILGWIRRAPGKERDFVAAISRSGRDTVYANSVKGRFTISRDNAKNMVYLRMDNLRPEDTAAYYCAVDSVPRGTPTITESEYAIWGQGTLVTVSSAAADYKDHDGDYKDHDIDYKDDDDKGAAHHHHHH

SEQ ID NO: 32 - protein, 145 aa, Artificial Sequence
  F0103265A11 (parental)-FLAG-HIS6
EVQLVESGGGLVQPGGSLRLSCAASGMLFNANTQGWYRQAPGKQRELVAFIFSGGYTNYVDSVKGRFTISRDNAKRTMYLQMNSLKPEDSAIYYCSLSRYLGQGTLVTVSSAAADYKDHDGDYKDHDIDYKDDDDKGAAHHHHHH

SEQ ID NO: 33 - protein, 149 aa, Artificial Sequence
  F0103265B04 (parental)-FLAG-HIS6
EVQLVESGGGLVQPGGSLRLSCAAPSFIFSNNYMEWYRQAPGKQRDWVARITGRGNTNYLDSVKGRFTISRDDAKNTVYLEIDSLKPEDTAVYYCSALWYGGRAWGKGTLVTVSSAAADYKDHDGDYKDHDIDYKDDDDKGAAHHHHHH

SEQ ID NO: 34 - protein, 154 aa, Artificial Sequence
  F0103275B05 (parental)-FLAG-HIS6
EVQLVESGGGLVQPGGSLRLSCAASGSIFNINSMAWYRRAPGKQRELVASSTNGGSTNYADSVKGRFTISRDNAKRVYLQMNSLTPEDTAVYYCNALLQPSIYDISRTYWGQGTLVTVSSAAADYKDHDGDYKDHDIDYKDDDDKGAAHHHHHH

SEQ ID NO: 35 - protein, 159 aa, Artificial Sequence
  F0103362B08 (parental)-FLAG-HIS6
EVQLVESGGGLVQAGGSLRLSCAASVRPFSTSAMGWFRQAPEKEREAVAGILWNGIVTYYADSVKGRFTISRDNAKNEVYLQMNKLKPEDTAVYYCALDRDYGGRSFSAYEYEYWGQGTLVTVSSAAADYKDHDGDYKDHDIDYKDDDDKGAAHHHHHH

SEQ ID NO: 36 - protein, 154 aa, Artificial Sequence
  F0103387G04 (parental)-FLAG-HIS6
EVQLVESGGGLAQPGGSLRLSCAASGPVFNINKMAWYRRAPGKQRELVASVTPTGSISYTDSVKGRFTISRDGSKRWSLQMNSLTPEDTAVYYCNALLQPDSYSNTRTYWGQGTLVTVSSAAADYKDHDGDYKDHDIDYKDDDDKGAAHHHHHH

SEQ ID NO: 37 - protein, 158 aa, Artificial Sequence
  F0103387G05 (parental)-FLAG-HIS6
EVQLVESGGGLVQAGGSLRLSCDASGRILRIGYMRWHRQGAGKQREFVARITDDSATDYADSVKGRFTISRDNAKNTVYLQMNNLNPEDTAVYYCEALVTASVRGGSIHSGTYWGRGTLVTVSSAAADYKDHDGDYKDHDIDYKDDDDKGAAHHHHHH

SEQ ID NO: 38 - protein, 154 aa, Artificial Sequence
  F0103454D07 (parental)-FLAG-HIS6
EVQLVESGGGLVQPGGSLRLSCVASGGIININYIAWYRQTPGKQRDLVARISSDDTIKYGDSVKGRFAMSRDKVKNMVHLQMNSLTTEDTGVYVCSALITPWTGDTRTYWGRGTLVTVSSAAADYKDHDGDYKDHDIDYKDDDDKGAAHHHHHH

SEQ ID NO: 39 - protein, 158 aa, Artificial Sequence
  F0103464B09 (parental)-FLAG-HIS6
EVQLVESGGGLVQPGGSLRLSCATTSRAFIRDVFTGWYRRVPGKERELVARIYNGGNTNYADFAKGRFSISRDNAKKMVTLRMSNLKPEDTGVYYCLFSGTINTGREYRSGDYWGQGTLVTVSSAAADYKDHDGDYKDHDIDYKDDDDKGAAHHHHHH

SEQ ID NO: 40 - protein, 218 aa, Artificial Sequence
  beta1 subunit
MGRLLALVVGAALVSSACGGCVEVDSETEAVYGMTFKILCISCKRRSETNAETFTEWTFRQKGTEEFVKILRYENEVLQLEEDERFEGRVVWNGSRGTKDLQDLSIFITNVTYNHSGDYECHVYRLLFFENYEHNTSVVKKIHIEVVDKANRDMASIVSEIMMYVLIVVLTIWLVAEMIYCYKKIAAATETAAQENASEYLAITSESKENCTGVQVAE

SEQ ID NO: 41 - protein, 215 aa, Artificial Sequence
  beta2 subunit
MHRDAWLPRPAFSLTGLSLFFSLVPPGRSMEVTVPATLNVLNGSDARLPCTFNSCYTVNHKQFSLNWTYQECNNCSEEMFLQFRMKIINLKLERFQDRVEFSGNPSKYDVSVMLRNVQPEDEGIYNCYIMNPPDRHRGHGKIHLQVLMEEPPERDSTVAVIVGASVGGFLAVVILVLMVVKCVRRKKEQKLSTDDLKTEEEGKTDGEGNPDDGAK

SEQ ID NO: 42 - protein, 215 aa, Artificial Sequence
  beta3 subunit
MPAFNRLFPLASLVLIYWVSVCFPVCVEVPSETEAVQGNPMKLRCISCMKREEVEATTVVEWFYRPEGGKDFLIYEYRNGHQEVESPFQGRLQWNGSKDLQDVSITVLNVTLNDSGLYTCNVSREFEFEAHRPFVKTTRLIPLRVTEEAGEDFTSVVSEIMMYILLVFLTLWLLIEMIYCYRKVSKAEEAAQENASDYLAIPSENKENSAVPVEE

SEQ ID NO: 43 - protein, 22 aa, Artificial Sequence
  P2A viral peptide
GSGATNFSLLKQAGDVEENPGP

SEQ ID NO: 44 - protein, 2220 aa, Artificial Sequence
  huNav1.7-beta1
MAMLPPPGPQSFVHFTKQSLALIEQRIAERKSKEPKEEKKDDDEEAPKPSSDLEAGKQLPFIYGDIPPGMVSEPLEDLDPYYADKKTFIVLNKGKTIFRFNATPALYMLSPFSPLRRISIKILVHSLFSMLIMCTILTNCIFMTMNNPPDWTKNVEYTFTGIYTFESLVKILARGFCVGEFTFLRDPWNWLDFVVIVFAYLTEFVNLGNVSALRTFRVLRALKTISVIPGLKTIVGALIQSVKKLSDVMILTVFCLSVFALIGLQLFMGNLKHKCFRNSLENNETLESIMNTLESEEDFRKYFYYLEGSKDALLCGFSTDSGQCPEGYTCVKIGRNPDYGYTSFDTFSWAFLALFRLMTQDYWENLYQQTLRAAGKTYMIFFVVVIFLGSFYLINLILAVVAMAYEEQNQANIEEAKQKELEFQQMLDRLKKEQEEAEAIAAAAAEYTSIRRSRIMGLSESSSETSKLSSKSAKERRNRRKKKNQKKLSSGEEKGDAEKLSKSESEDSIRRKSFHLGVEGHRRAHEKRLSTPNQSPLSIRGSLFSARRSSRTSLFSFKGRGRDIGSETEFADDEHSIFGDNESRRGSLFVPHRPQERRSSNISQASRSPPMLPVNGKMHSAVDCNGVVSLVDGRSALMLPNGQLLPEGTTNQIHKKRRCSSYLLSEDMLNDPNLRQRAMSRASILTNTVEELEESRQKCPPWWYRFAHKFLIWNCSPYWIKFKKCIYFIVMDPFVDLAITICIVLNTLFMAMEHHPMTEEFKNVLAIGNLVFTGIFAAEMVLKLIAMDPYEYFQVGWNIFDSLIVTLSLVELFLADVEGLSVLRSFRLLRVFKLAKSWPTLNMLIKIIGNSVGALGNLTLVLAIIVFIFAVVGMQLFGKSYKECVCKINDDCTLPRWHMNDFFHSFLIVFRVLCGEWIETMWDCMEVAGQAMCLIVYMMVMVIGNLVVLNLFLALLLSSFSSDNLTAIEEDPDANNLQIAVTRIKKGINYVKQTLREFILKAFSKKPKISREIRQAEDLNTKKENYISNHTLAEMSKGHNFLKEKDKISGFGSSVDKHLMEDSDGQSFIHNPSLTVTVPIAPGESDLENMNAEELSSDSDSEYSKVRLNRSSSSECSTVDNPLPGEGEEAEAEPMNSDEPEACFTDGCVRRFSCCQVNIESGKGKIWWNIRKTCYKIVEHSWFESFIVLMILLSSGALAFEDIYIERKKTIKIILEYADKIFTYIFILEMLLKWIAYGYKTYFTNAWCWLDFLIVDVSLVTLVANTLGYSDLGPIKSLRTLRALRPLRALSRFEGMRVVVNALIGAIPSIMNVLLVCLIFWLIFSIMGVNLFAGKFYECINTTDGSRFPASQVPNRSECFALMNVSQNVRWKNLKVNFDNVGLGYLSLLQVATFKGWTIIMYAAVDSVNVDKQPKYEYSLYMYIYFVVFIIFGSFFTLNLFIGVIIDNFNQQKKKLGGQDIFMTEEQKKYYNAMKKLGSKKPQKPIPRPGNKIQGCIFDLVTNQAFDISIMVLICLNMVTMMVEKEGQSQHMTEVLYWINVVFIILFTGECVLKLISLRHYYFTVGWNIFDFVVVIISIVGMFLADLIETYFVSPTLFRVIRLARIGRILRLVKGAKGIRTLLFALMMSLPALFNIGLLLFLVMFIYAIFGMSNFAYVKKEDGINDMFNFETFGNSMICLFQITTSAGWDGLLAPILNSKPPDCDPKKVHPGSSVEGDCGNPSVGIFYFVSYIIISFLVVVNMYIAVILENFSVATEESTEPLSEDDFEMFYEVWEKFDPDATQFIEFSKLSDFAAALDPPLLIAKPNKVQLIAMDLPMVSGDRIHCLDILFAFTKRVLGESGEMDSLRSQMEERFMSANPSKVSYEPITTTLKRKQEDVSATVIQRAYRRYRLRQNVKNISSIYIKDGDRDDDLLNKKDMAFDNVNENSSPEKTDATSSTTSPPSYDSVTKPDKEKYEQDRTEKEDKGKDSKESKKSGRGSGATNFSLLKQAGDVEENPGPMGRLLALVVGAALVSSACGGCVEVDSETEAVYGMTFKILCISCKRRSETNAETFTEWTFRQKGTEEFVKILRYENEVLQLEEDERFEGRVVWNGSRGTKDLQDLSIFITNVTYNHSGDYECHVYRLLFFENYEHNTSVVKKIHIEVVDKANRDMASIVSEIMMYVLIVVLTIWLVAEMIYCYKKIAAATETAAQENASEYLAITSESKENCTGVQVAE

SEQ ID NO: 45 - protein, 1984 aa, Artificial Sequence
  muNav1.7
MAMLPPPGPQSFVHFTKQSLALIEQRISEEKAKGHKDEKKDDEEEGPKPSSDLEAGKQLPFIYGDIPPGMVSEPLEDLDPYYADKKTFIVLNKGKAIFRFNATPALYMLSPFSPLRRISIKILVHSLFSMLIMCTILTNCIFMTMSNPPDWTKNVEYTFTGIYTFESLIKILARGFCVGEFTFLRDPWNWLDFVVIVFAYLTEFVNLGNVSALRTFRVLRALKTISVIPGLKTIVGALIQSVKKLSDVMILTVFCLSVFALIGLQLFMGNLKHKCFRKDLEQNETLESIMSTAESEEELKRYFYYLEGSKDALLCGFSTDSGQCPEGYECVTAGRNPDYGYTSFDTFGWAFLALFRLMTQDYWENLYQQTLRAAGKTYMIFFVVVIFLGSFYLINLILAVVAMAYEEQNQANIEEAKQKELEFQQMLDRLKKEQEEAEAIAAAAAEYTSLGRSRIMGLSESSSETSRLSSKSAKERRNRRKKKKQKLSSGEEKGDDEKLSKSGSEESIRKKSFHLGVEGHHRAREKRLSTPNQSPLSIRGSLFSARRSSRTSLFSFKGRGRDLGSETEFADDEHSIFGDNESRRGSLFVPHRPRERRSSNISQASRSPPVLPVNGKMHSAVDCNGVVSLVDGPSALMLPNGQLLPEVIIDKATSDDSGTTNQMRKKRLSSSYFLSEDMLNDPHLRQRAMSRASILTNTVEELEESRQKCPPWWYRFAHTFLIWNCSPYWIKFKKFIYFIVMDPFVDLAITICIVLNTLFMAMEHHPMTDEFKNVLAVGNLVFTGIFAAEMVLKLIAMDPYEYFQVGWNIFDSLIVTLSLVELFLADVEGLSVLRSFRLLRVFKLAKSWPTLNMLIKIIGNSVGALGNLTLVLAIIVFIFAVVGMQLFGKSYKECVCKINENCKLPRWHMNDFFHSFLIVFRVLCGEWIETMWDCMEVAGQTMCLIVYMMVMVIGNLVVLNLFLALLLSSFSSDNLTAIEEDTDANNLQIAVARIKRGINYVKQTLREFILKSFSKKPKGSKDTKRTADPNNKRENYISNRTLAEISKDHNFLKEKDKISGFSSSLDKSFMDENDYQSFIHNPSLTVTVPIAPGESDLENMNTEELSSDSDSDYSKERRNRSSSSECSTVDNPLPGEEEAEAEPINADEPEACFTDGCVRRFPCCQVNIDTGKGKVWWTIRKTCYRIVEHSWFESFIVLMILLSSGALAFEDIYIEKKKTIKIILEYADKIFTYIFILEMLLKWVAYGYKTYFTNAWCWLDFLIVDVSLVTLVANTLGYSDLGPIKSLRTLRALRPLRALSRFEGMRVVVNALIGAIPSIMNVLLVCLIFWLIFSIMGVNLFAGKFYECVNTTDGSRFSVSQVANRSECFALMNVSGNVRWKNLKVNFDNVGLGYLSLLQVATFKGWMDIMYAAVDSVNVNAQPIYEYNLYMYIYFVIFIIFGSFFTLNLFIGVIIDNFNQQKKKLGGQDIFMTEEQKKYYNAMKKLGSKKPQKPIPRPGNKFQGCIFDLVTNQAFDITIMVLICLNMVTMMVEKEGQTDYMSFVLYWINVVFIILFTGECVLKLISLRHYYFTVGWNIFDFVVVILSIVGMFLAEMIEKYFVSPTLFRVIRLARIGRILRLIKGAKGIRTLLFALMMSLPALFNIGLLLFLVMFIYAIFGMSNFAYVKKEAGINDMFNFETFGNSMICLFQITTSAGWDGLLAPILNSAPPDCDPKKVHPGSSVEGDCGNPSVGIFYFVSYIIISFLVVVNMYIAVILENFSVATEESTEPLSEDDFEMFYEVWEKFDPDATQFIEFCKLSDFAAALDPPLLIAKPNKVQLIAMDLPMVSGDRIHCLDILFAFTKRVLGESGEMDSLRSQMEERFMSANPSKVSYEPITTTLKRKQEDVSATIIQRAYRRYRLRQNVKNISSIYIKDGDRDDDLPNKEDIVFDNVNENSSPEKTDATASTISPPSYDSVTKPDQEKYETDKTEKEDKEKDESRK

SEQ ID NO: 46 - protein, 122 aa, Artificial Sequence
  F0103262B06 (parental)
EVQLVESGGGLVQPGGSLRLSCAGSTRTFSTYAMGWFRQAPGREREFVAHINFSGSSTRYADSVKGRFTISRDNAKNMGYLQMNSLKPEDTAVYYCAARWVAGPPRYDYEYWGQGTLVTVSS

SEQ ID NO: 47 - protein, 126 aa, Artificial Sequence
  F0103262C02 (parental)
EVQLVESGGGLVQAGGSLTLSCAASGLPFGLYILGWIRRAPGKERDFVAAISRSGRDTVYANSVKGRFTISRDNAKNMVYLRMDNLRPEDTAAYYCAVDSVPRGTPTITESEYAIWGQGTLVTVSS

SEQ ID NO: 48 - protein, 111 aa, Artificial Sequence
  F0103265A11 (parental)
EVQLVESGGGLVQPGGSLRLSCAASGMLFNANTQGWYRQAPGKQRELVAFIFSGGYTNYVDSVKGRFTISRDNAKRTMYLQMNSLKPEDSAIYYCSLSRYLGQGTLVTVSS

SEQ ID NO: 49 - protein, 115 aa, Artificial Sequence
  F0103265B04 (parental)
EVQLVESGGGLVQPGGSLRLSCAAPSFIFSNNYMEWYRQAPGKQRDWVARITGRGNTNYLDSVKGRFTISRDDAKNTVYLEIDSLKPEDTAVYYCSALWYGGRAWGKGTLVTVSS

SEQ ID NO: 50 - protein, 120 aa, Artificial Sequence
  F0103275B05 (parental)
EVQLVESGGGLVQPGGSLRLSCAASGSIFNINSMAWYRRAPGKQRELVASSTNGGSTNYADSVKGRFTISRDNAKRVYLQMNSLTPEDTAVYYCNALLQPSIYDISRTYWGQGTLVTVSS

SEQ ID NO: 51 - protein, 125 aa, Artificial Sequence
  F0103362B08 (parental)
EVQLVESGGGLVQAGGSLRLSCAASVRPFSTSAMGWFRQAPEKEREAVAGILWNGIVTYYADSVKGRFTISRDNAKNEVYLQMNKLKPEDTAVYYCALDRDYGGRSFSAYEYEYWGQGTLVTVSS

SEQ ID NO: 52 - protein, 120 aa, Artificial Sequence
  F0103387G04 (parental)
EVQLVESGGGLAQPGGSLRLSCAASGPVFNINKMAWYRRAPGKQRELVASVTPTGSISYTDSVKGRFTISRDGSKRWSLQMNSLTPEDTAVYYCNALLQPDSYSNTRTYWGQGTLVTVSS

SEQ ID NO: 53 - protein, 124 aa, Artificial Sequence
  F0103387G05 (parental)
EVQLVESGGGLVQAGGSLRLSCDASGRILRIGYMRWHRQGAGKQREFVARITDDSATDYADSVKGRFTISRDNAKNTVYLQMNNLNPEDTAVYYCEALVTASVRGGSIHSGTYWGRGTLVTVSS

SEQ ID NO: 54 - protein, 120 aa, Artificial Sequence
  F0103454D07 (parental)
EVQLVESGGGLVQPGGSLRLSCVASGGIININYIAWYRQTPGKQRDLVARISSDDTIKYGDSVKGRFAMSRDKVKNMVHLQMNSLTTEDTGVYVCSALITPWTGDTRTYWGRGTLVTVSS

SEQ ID NO: 55 - protein, 124 aa, Artificial Sequence
  F0103464B09 (parental)
EVQLVESGGGLVQPGGSLRLSCATTSRAFIRDVFTGWYRRVPGKERELVARIYNGGNTNYADFAKGRFSISRDNAKKMVTLRMSNLKPEDTGVYYCLFSGTINTGREYRSGDYWGQGTLVTVSS

SEQ ID NO: 56 - protein, 34 aa, Artificial Sequence
  FLAG-HIS6 peptide
AAADYKDHDGDYKDHDIDYKDDDDKGAAHHHHHH

SEQ ID NO: 57 - protein, 125 aa, Artificial Sequence
  human VH3-JH consensus
  MISC_FEATURE (99)..(114): Xaa= are each independently any amino acid except Cys
EVQLVESGGGLVQPGGSLRLSCAASGFTFSSYAMHWVRQAPGKGLEWVSVISSSGSSTYYADSVKGRFTISRDNSKNTLYLQMNSLRAEDTAVYYCARXXXXXXXXXXXXXXXXWGQGTLVTVSS

SEQ ID NO: 58 - protein, 97 aa, Artificial Sequence
  VHH2-consensus
QVQLVESGGGLVQAGGSLRLSCAASGSIFSINAMGWYRQAPGKQRELVAAITSGGSTNYADSVKGRFTISRDNAKNTLYLQMNSLKPEDTAVYYCNA

SEQ ID NO: 59 - protein, 120 aa, Artificial Sequence
  F0103387G04_SO
DVQLVESGGGVVQPGGSLRLSCAASGPVFNINRMAWYRQAPGKQRELVAYVTPTGDISYADSVKGRFTISDDGSKRVSLQMNSLRPEDTALYYCRALLQPSSYSGTRTYWGQGTLVTVSS

SEQ ID NO: 60 - protein, 120 aa, Artificial Sequence; identical to SEQ ID NO: 59
  F0103387G05_SO

SEQ ID NO: 61 - protein, 124 aa, Artificial Sequence
  F0103464B09_SO
DVQLVESGGGVVQPGGSLRLSCAASHRAFIRDVFTGWYRQAPGKQRELVARIYEGGNTQYADFAKGRFSISRDNAKKTVYLQMNSLRAEDTALYYCLFSGTISTGREYRSGDYWGQGTLVTVSS

SEQ ID NO: 62 - protein, 56 aa, Artificial Sequence
  Nav1.7 alpha epitope
FRNSLENNETLESIMNTLESEEDFRKYFYYLEGSKDALLCGFSTDSGQCPEGYTCV

SEQ ID NO: 63 - protein, 738 aa, Artificial Sequence
  Nav1.7 alpha Domain I
MAMLPPPGPQSFVHFTKQSLALIEQRIAERKSKEPKEEKKDDDEEAPKPSSDLEAGKQLPFIYGDIPPGMVSEPLEDLDPYYADKKTFIVLNKGKTIFRFNATPALYMLSPFSPLRRISIKILVHSLFSMLIMCTILTNCIFMTMNNPPDWTKNVEYTFTGIYTFESLVKILARGFCVGEFTFLRDPWNWLDFVVIVFAYLTEFVNLGNVSALRTFRVLRALKTISVIPGLKTIVGALIQSVKKLSDVMILTVFCLSVFALIGLQLFMGNLKHKCFRNSLENNETLESIMNTLESEEDFRKYFYYLEGSKDALLCGFSTDSGQCPEGYTCVKIGRNPDYGYTSFDTFSWAFLALFRLMTQDYWENLYQQTLRAAGKTYMIFFVVVIFLGSFYLINLILAVVAMAYEEQNQANIEEAKQKELEFQQMLDRLKKEQEEAEAIAAAAAEYTSIRRSRIMGLSESSSETSKLSSKSAKERRNRRKKKNQKKLSSGEEKGDAEKLSKSESEDSIRRKSFHLGVEGHRRAHEKRLSTPNQSPLSIRGSLFSARRSSRTSLFSFKGRGRDIGSETEFADDEHSIFGDNESRRGSLFVPHRPQERRSSNISQASRSPPMLPVNGKMHSAVDCNGVVSLVDGRSALMLPNGQLLPEVIIDKATSDDSGTTNQIHKKRRCSSYLLSEDMLNDPNLRQRAMSRASILTNTVEELEESRQKCPPWWYRFAHKFLIWNCSPYWIKFKKCIY

SEQ ID NO: 64 - protein, 107 aa, Artificial Sequence
  Nav1.7alpha Domain I S5-S6 loop
KHKCFRNSLENNETLESIMNTLESEEDFRKYFYYLEGSKDALLCGFSTDSGQCPEGYTCVKIGRNPDYGYTSFDTFSWAFLALFRLMTQDYWENLYQQTLRAAGKTY

SEQ ID NO: 65 - protein, 12 aa, Artificial Sequence
  Nav1.7 alpha Exon 5N
YLTEFVNLGNVS

SEQ ID NO: 66 - protein, 12 aa, Artificial Sequence
  Nav1.7 alpha Exon 5A
YVTEFVDLGNVS

SEQ ID NO: 67 - protein, 9 aa, Artificial Sequence
  Nav1.7 alpha Exon 11S
LPNGQLLPE

SEQ ID NO: 68 - protein, 20 aa, Artificial Sequence
  Nav1.7 alpha Exon 11L
LPNGQLLPEVIIDKATSDDS

SEQ ID NO: 69 - protein, 120 aa, Artificial Sequence
  F010301461 F0103275B05
EVQLVESGGGLVQPGGSLRLSCAASGSIFNINRMAWYRRAPGKQRELVAYSTNGGDTNYADSVKGRFTISRDNAKRVYLQMNSLTPEDTAVYYCRALLQPSIYDISRTYWGQGTLVTVSS

SEQ ID NO: 70 - protein, 120 aa, Artificial Sequence
  >F010301635 F0103275B05
EVQLVESGGGVVQPGGSLRLSCAASGSIFNINSMAWYRQAPGKQRELVASSTNGGSTNYADSVKGRFTISRDNAKRVYLQMNSLRPEDTALYYCNALLQPSIYDISRTYWGQGTLVTVSS

SEQ ID NO: 71 - protein, 120 aa, Artificial Sequence
  >F010301636 F0103275B05
EVQLVESGGGVVQPGGSLRLSCAASGSIFNINSMAWYRRAPGKQRELVASSTNGGSTNYADSVKGRFTISRDNAKNVYLQMNSLRPEDTALYYCNALLQPSIYDISRTYWGQGTLVTVSS

SEQ ID NO: 72 - protein, 120 aa, Artificial Sequence
  >F010301637 F0103275B05
EVQLVESGGGVVQPGGSLRLSCAASGSIFNINSMAWYRRAPGKQRELVASSTNGGSTNYADSVKGRFTISRDNAKRVYLQMNSLRPEDTALYYCNALLQPSIYDISRTYWGQGTLVTVSS

SEQ ID NO: 73 - protein, 120 aa, Artificial Sequence
  >F010301638 F0103275B05
EVQLVESGGGVVQPGGSLRLSCAASGSIFNINSMAWYRQAPGKQRELVASSTNGGSTNYADSVKGRFTISRDNAKNVYLQMNSLRPEDTALYYCNALLQPSIYDISRTYWGQGTLVTVSS

SEQ ID NO: 74 - protein, 121 aa, Artificial Sequence
  >F010301639 F0103275B05
EVQLVESGGGVVQPGGSLRLSCAASGSIFNINSMAWYRQAPGKQRELVASSTNGGSTNYADSVKGRFTISRDNAKRTVYLQMNSLRPEDTALYYCNALLQPSIYDISRTYWGQGTLVTVSS

SEQ ID NO: 75 - protein, 121 aa, Artificial Sequence
  >F010301640 F0103275B05(R76_V78insT)(L11V,T83R,V89L)
EVQLVESGGGVVQPGGSLRLSCAASGSIFNINSMAWYRRAPGKQRELVASSTNGGSTNYADSVKGRFTISRDNAKRTVYLQMNSLRPEDTALYYCNALLQPSIYDISRTYWGQGTLVTVSS

SEQ ID NO: 76 - protein, 121 aa, Artificial Sequence
  >F010301641 F0103275B05
EVQLVESGGGVVQPGGSLRLSCAASGSIFNINSMAWYRRAPGKQRELVASSTNGGSTNYADSVKGRFTISRDNAKNTVYLQMNSLRPEDTALYYCNALLQPSIYDISRTYWGQGTLVTVSS

SEQ ID NO: 77 - protein, 121 aa, Artificial Sequence
  >F010301642 F0103275B05
EVQLVESGGGVVQPGGSLRLSCAASGSIFNINSMAWYRQAPGKQRELVASSTNGGSTNYADSVKGRFTISRDNAKNTVYLQMNSLRPEDTALYYCNALLQPSIYDISRTYWGQGTLVTVSS

SEQ ID NO: 78 - protein, 120 aa, Artificial Sequence
  >F010301652 F0103275B05
EVQLVESGGGVVQPGGSLRLSCAASGSIFNINRMAWYRRAPGKQRELVAYSTNGGDTNYADSVKGRFTISRDNAKNVYLQMNSLRPEDTALYYCRALLQPSIYDISRTYWGQGTLVTVSS

SEQ ID NO: 79 - protein, 120 aa, Artificial Sequence
  >F010301653 F0103275B05
EVQLVESGGGVVQPGGSLRLSCAASGSIFNINRMAWYRRAPGKQRELVAYSTNGGDTNYADSVKGRFTISRDNAKRVYLQMNSLRPEDTALYYCRALLQPSIYDISRTYWGQGTLVTVSS

SEQ ID NO: 80 - protein, 120 aa, Artificial Sequence
  >F010301654 F0103275B05
EVQLVESGGGVVQPGGSLRLSCAASGSIFNINRMAWYRQAPGKQRELVAYSTNGGDTNYADSVKGRFTISRDNAKRVYLQMNSLRPEDTALYYCRALLQPSIYDISRTYWGQGTLVTVSS

SEQ ID NO: 81 - protein, 120 aa, Artificial Sequence
  F010301655 F0103275B05
EVQLVESGGGVVQPGGSLRLSCAASGSIFNINRMAWYRQAPGKQRELVAYSTNGGDTNYADSVKGRFTISRDNAKNVYLQMNSLRPEDTALYYCRALLQPSIYDISRTYWGQGTLVTVSS

SEQ ID NO: 82 - protein, 124 aa, Artificial Sequence
  F010301556 F0103387G05
EVQLVESGGGLVQAGGSLRLSCAASGRILRIGYMRWHRQGAGKQREFVARITGGSATGYADSVKGRFTISRDNAKNTVYLQMNNLNPEDTAVYYCEALVTASVRGGSIHSGTYWGRGTLVTVSS

SEQ ID NO: 83 - protein, 124 aa, Artificial Sequence
  >F010301563 F0103387G05
EVQLVESGGGLVQAGGSLRLSCAASGRILRIGYMRWHRQGAGKQREFVARITDDSATGYADSVKGRFTISRDNAKNTVYLQMNNLNPEDTAVYYCEALVTASVRGGSIHSGTYWGRGTLVTVSS

SEQ ID NO: 84 - protein, 124 aa, Artificial Sequence
  >F010301849 F0103387G05
EVQLVESGGGVVQPGGSLRLSCAASGRILRIGYMRWHRQAPGKQREFVARITDDSATGYADSVKGRFTISRDNAKNTVYLQMNSLRPEDTALYYCEALVTASVRGGSIHSGTYWGQGTLVTVSS

SEQ ID NO: 85 - protein, 124 aa, Artificial Sequence
  F010301850 F0103387G05
EVQLVESGGGVVQPGGSLRLSCAASGRILRIGYMRWYRQAPGKQREFVARITDDSATGYADSVKGRFTISRDNAKNTVYLQMNSLRPEDTALYYCEALVTASVRGGSIHSGTYWGQGTLVTVSS

SEQ ID NO: 86 - protein, 124 aa, Artificial Sequence
  >F010301643 F0103387G05
EVQLVESGGGVVQPGGSLRLSCAASGRILRIGYMRWHRQGAGKQREFVARITDDSATDYADSVKGRFTISRDNAKNTVYLQMNSLRPEDTALYYCEALVTASVRGGSIHSGTYWGQGTLVTVSS

SEQ ID NO: 87 - protein, 124 aa, Artificial Sequence
  F010301644 F0103387G05
EVQLVESGGGVVQPGGSLRLSCDASGRILRIGYMRWYRQGAGKQREFVARITDDSATDYADSVKGRFTISRDNAKNTVYLQMNSLRPEDTALYYCEALVTASVRGGSIHSGTYWGQGTLVTVSS

SEQ ID NO: 88 - protein, 124 aa, Artificial Sequence
  >F010301645 F0103387G05
EVQLVESGGGVVQPGGSLRLSCDASGRILRIGYMRWHRQAAGKQREFVARITDDSATDYADSVKGRFTISRDNAKNTVYLQMNSLRPEDTALYYCEALVTASVRGGSIHSGTYWGQGTLVTVSS

SEQ ID NO: 89 - protein, 124 aa, Artificial Sequence
  >F010301646 F0103387G05
EVQLVESGGGVVQPGGSLRLSCDASGRILRIGYMRWHRQGPGKQREFVARITDDSATDYADSVKGRFTISRDNAKNTVYLQMNSLRPEDTALYYCEALVTASVRGGSIHSGTYWGQGTLVTVSS

SEQ ID NO: 90 - protein, 124 aa, Artificial Sequence
  >F010301647 F0103387G05
EVQLVESGGGVVQPGGSLRLSCDASGRILRIGYMRWHRQGAGKQRELVARITDDSATDYADSVKGRFTISRDNAKNTVYLQMNSLRPEDTALYYCEALVTASVRGGSIHSGTYWGQGTLVTVSS

SEQ ID NO: 91 - protein, 124 aa, Artificial Sequence
  >F010301648 F0103387G05
EVQLVESGGGVVQPGGSLRLSCDASGRILRIGYMRWHRQGAGKQREFVARITDDSATDYADSVKGRFTISRDNAKNTVYLQMNSLRPEDTALYYCNALVTASVRGGSIHSGTYWGQGTLVTVSS

SEQ ID NO: 92 - protein, 124 aa, Artificial Sequence
  >F010301649 F0103387G05
EVQLVESGGGVVQPGGSLRLSCDASGRILRIGYMRWHRQGAGKQREFVARITDDSATDYADSVKGRFTISRDNAKNTVYLQMNSLRPEDTALYYCEALVTASVRGGSIHSGTYWGQGTLVTVSS

SEQ ID NO: 93 - protein, 124 aa, Artificial Sequence
  F010302307 F0103387G05
EVQLVESGGGVVQPGGSLRLSCAASGRILRIGYMRWYRQAPGKQREFVARITDDSATGYADSVKGRFTISRDAAKNTVYLQMNSLRPEDTALYYCEALVTASVRGGSIHSGTYWGQGTLVTVSS

SEQ ID NO: 94 - protein, 124 aa, Artificial Sequence
  >F010302308 F0103387G05
EVQLVESGGGVVQPGGSLRLSCAASGRILRIGYMRWYRQAPGKQREFVARITDDSATGYADSVKGRFTISRDYAKNTVYLQMNSLRPEDTALYYCEALVTASVRGGSIHSGTYWGQGTLVTVSS

SEQ ID NO: 95 - protein, 124 aa, Artificial Sequence
  >F010302309 F0103387G05
EVQLVESGGGVVQPGGSLRLSCAASGRILRIGYMRWYRQAPGKQREFVARITDDSATGYADSVKGRFTISRDQAKNTVYLQMNSLRPEDTALYYCEALVTASVRGGSIHSGTYWGQGTLVTVSS

SEQ ID NO: 96 - protein, 124 aa, Artificial Sequence
  F010302391 F0103387G05
EVQLVESGGGVVQPGGSLRLSCAASGRILRIGYMRWYRQAPGKQREFVARITGGSATGYADSVKGRFTISRDNAKNTVYLQMNSLRPEDTALYYCEALVTASVRGGSIHSGTYWGQGTLVTVSS

SEQ ID NO: 97 - protein, 124 aa, Artificial Sequence
  >F010302392 F0103387G05
EVQLVESGGGVVQPGGSLRLSCAASGRILRIGYMRWYRQAPGKQREFVARITGGSATGYADSVKGRFTISRDQAKNTVYLQMNSLRPEDTALYYCEALVTASVRGGSIHSGTYWGQGTLVTVSS

SEQ ID NO: 98 - protein, 124 aa, Artificial Sequence
  F010301868 F0103464B09(L11V,S68T,T79Y,R81Q,S82aN,N82bS,K83R,G88A,V89L)
EVQLVESGGGVVQPGGSLRLSCATTSRAFIRDVFTGWYRRVPGKERELVARIYNGGNTNYADFAKGRFTISRDNAKKMVYLQMNSLRPEDTALYYCLFSGTINTGREYRSGDYWGQGTLVTVSS

SEQ ID NO: 99 - protein, 124 aa, Artificial Sequence
  F010301869 F0103464B09
EVQLVESGGGVVQPGGSLRLSCATTSRAFIRDVFTGWYRRVPGKERELVARIYNGGNTNYADFAKGRFTISRDNAKKTVYLQMNSLRPEDTALYYCLFSGTINTGREYRSGDYWGQGTLVTVSS

SEQ ID NO: 100 - protein, 124 aa, Artificial Sequence
  >F010301870 F0103464B09
EVQLVESGGGVVQPGGSLRLSCATTSRAFIRDVFTGWYRRVPGKERELVARIYNGGNTNYADFAKGRFTISRDNAKKMVYLQMNSLRPEDTALYYCNFSGTINTGREYRSGDYWGQGTLVTVSS

SEQ ID NO: 101 - protein, 124 aa, Artificial Sequence
  F010301871 F0103464B09
EVQLVESGGGVVQPGGSLRLSCAATSRAFIRDVFTGWYRRVPGKERELVARIYNGGNTNYADFAKGRFTISRDNAKKMVYLQMNSLRPEDTALYYCLFSGTINTGREYRSGDYWGQGTLVTVSS

SEQ ID NO: 102 - protein, 124 aa, Artificial Sequence
  F010301872 F0103464B09
EVQLVESGGGVVQPGGSLRLSCATSSRAFIRDVFTGWYRRVPGKERELVARIYNGGNTNYADFAKGRFTISRDNAKKMVYLQMNSLRPEDTALYYCLFSGTINTGREYRSGDYWGQGTLVTVSS

SEQ ID NO: 103 - protein, 124 aa, Artificial Sequence
  F010301873 F0103464B09
EVQLVESGGGVVQPGGSLRLSCATTSRAFIRDVFTGWYRQVPGKERELVARIYNGGNTNYADFAKGRFTISRDNAKKMVYLQMNSLRPEDTALYYCLFSGTINTGREYRSGDYWGQGTLVTVSS

SEQ ID NO: 104 - protein, 124 aa, Artificial Sequence
  F010301874 F0103464B09
EVQLVESGGGVVQPGGSLRLSCATTSRAFIRDVFTGWYRRAPGKERELVARIYNGGNTNYADFAKGRFTISRDNAKKMVYLQMNSLRPEDTALYYCLFSGTINTGREYRSGDYWGQGTLVTVSS

SEQ ID NO: 105 - protein, 124 aa, Artificial Sequence
  F010301875 F0103464B09
EVQLVESGGGVVQPGGSLRLSCATTSRAFIRDVFTGWYRRVPGKERELVARIYNGGNTNYADSAKGRFTISRDNAKKMVYLQMNSLRPEDTALYYCLFSGTINTGREYRSGDYWGQGTLVTVSS

SEQ ID NO: 106 - protein, 124 aa, Artificial Sequence
  F010301876 F0103464B09
EVQLVESGGGVVQPGGSLRLSCATTSRAFIRDVFTGWYRRVPGKERELVARIYNGGNTNYADFVKGRFTISRDNAKKMVYLQMNSLRPEDTALYYCLFSGTINTGREYRSGDYWGQGTLVTVSS

SEQ ID NO: 107 - protein, 124 aa, Artificial Sequence
  F010301877 F0103464B09
EVQLVESGGGVVQPGGSLRLSCATTSRAFIRDVFTGWYRRVPGKERELVARIYNGGNTNYADFAKGRFTISRDNAKNMVYLQMNSLRPEDTALYYCLFSGTINTGREYRSGDYWGQGTLVTVSS

SEQ ID NO: 108 - protein, 124 aa, Artificial Sequence
  F010301892 F0103464B09
EVQLVESGGGLVQPGGSLRLSCATTSRAFIRDLFTGWYRRVPGKERELVARIYNGGNTNYADFAKGRFSISRDNAKKMVTLRMSNLKPEDTGVYYCLFSGTINTGREYRSGDYWGQGTLVTVSS

SEQ ID NO: 109 - protein, 124 aa, Artificial Sequence
  F010301893 F0103464B09
EVQLVESGGGVVQPGGSLRLSCATTSRAFIRDVFTGWYRRVPGKQRELVARIYNGGNTNYADFAKGRFTISRDNAKKMVYLQMNSLRPEDTALYYCLFSGTINTGREYRSGDYWGQGTLVTVSS

SEQ ID NO: 110 - protein, 124 aa, Artificial Sequence
  >F010301932 F0103464B09
EVQLVESGGGVVQPGGSLRLSCATTSRAFIRDVFTGWYRRVPGKERELVARIYNGGNTNYADFAKGRFSISRDNAKKMVTLRMSNLRPEDTGLYYCLFSGTINTGREYRSGDYWGQGTLVTVSS

SEQ ID NO: 111 - protein, 124 aa, Artificial Sequence
  F010301933 F0103464B09
EVQLVESGGGVVQPGGSLRLSCATTSRAFIRDVFTGWYRRVPGKERELVARIYNGGNTNYADFAKGRFTISRDNAKKMVTLRMSNLRPEDTGLYYCLFSGTINTGREYRSGDYWGQGTLVTVSS

SEQ ID NO: 112 - protein, 124 aa, Artificial Sequence
  F010301934 F0103464B09
EVQLVESGGGVVQPGGSLRLSCATTSRAFIRDVFTGWYRRVPGKERELVARIYNGGNTNYADFAKGRFSISRDNAKKTVTLRMSNLRPEDTGLYYCLFSGTINTGREYRSGDYWGQGTLVTVSS

SEQ ID NO: 113 - protein, 124 aa, Artificial Sequence
  F010301935 F0103464B09
EVQLVESGGGVVQPGGSLRLSCATTSRAFIRDVFTGWYRRVPGKERELVARIYNGGNTNYADFAKGRFSISRDNAKKMVYLRMSNLRPEDTGLYYCLFSGTINTGREYRSGDYWGQGTLVTVSS

SEQ ID NO: 114 - protein, 124 aa, Artificial Sequence
  F010301936 F0103464B09
EVQLVESGGGVVQPGGSLRLSCATTSRAFIRDVFTGWYRRVPGKERELVARIYNGGNTNYADFAKGRFSISRDNAKKMVTLQMSNLRPEDTGLYYCLFSGTINTGREYRSGDYWGQGTLVTVSS

SEQ ID NO: 115 - protein, 124 aa, Artificial Sequence
  F010301937 F0103464B09
EVQLVESGGGVVQPGGSLRLSCATTSRAFIRDVFTGWYRRVPGKERELVARIYNGGNTNYADFAKGRFSISRDNAKKMVTLRMNNLRPEDTGLYYCLFSGTINTGREYRSGDYWGQGTLVTVSS

SEQ ID NO: 116 - protein, 124 aa, Artificial Sequence
  F010301938 F0103464B09
EVQLVESGGGVVQPGGSLRLSCATTSRAFIRDVFTGWYRRVPGKERELVARIYNGGNTNYADFAKGRFSISRDNAKKMVTLRMSSLRPEDTGLYYCLFSGTINTGREYRSGDYWGQGTLVTVSS

SEQ ID NO: 117 - protein, 124 aa, Artificial Sequence
  F010301939 F0103464B09
EVQLVESGGGVVQPGGSLRLSCATTSRAFIRDVFTGWYRRVPGKERELVARIYNGGNTNYADFAKGRFSISRDNAKKMVTLRMSNLRPEDTALYYCLFSGTINTGREYRSGDYWGQGTLVTVSS

SEQ ID NO: 118 - protein, 124 aa, Artificial Sequence
  F010302333 F0103464B09
EVQLVESGGGVVQPGGSLRLSCAASSRQFIRDVFTGWYRRAPGKQRELVARIYNEGNTNYADSAKGRFTISRDNAKKTVYLQMNSLRPEDTALYYCLFSGTISTGREYRSGDYWGQGTLVTVSS

SEQ ID NO: 119 - protein, 124 aa, Artificial Sequence
  F010302334 F0103464B09
EVQLVESGGGVVQPGGSLRLSCAASSRQFIRDVFTGWYRRAPGKQRELVARIYNEGNTQYADSAKGRFTISRDNAKKTVYLQMNSLRPEDTALYYCLFSGTISTGREYRSGDYWGQGTLVTVSS

SEQ ID NO: 120 - protein, 124 aa, Artificial Sequence
  F010302335 F0103464B09
EVQLVESGGGVVQPGGSLRLSCAASSRQFIRDVFTGWYRRAPGKQRELVARIYESGNTQYADSAKGRFTISRDNAKKTVYLQMNSLRPEDTALYYCLFSGTISTGREYRSGDYWGQGTLVTVSS

SEQ ID NO: 121 - protein, 124 aa, Artificial Sequence
  F010302336 F0103464B09
EVQLVESGGGVVQPGGSLRLSCAASHRQFIRDVFTGWYRRAPGKQRELVARIYNEGNTQYADSAKGRFTISRDNAKKTVYLQMNSLRPEDTALYYCLFSGTISTGREYRSGDYWGQGTLVTVSS

SEQ ID NO: 122 - protein, 124 aa, Artificial Sequence
  F010302337 F0103464B09
EVQLVESGGGVVQPGGSLRLSCAASHRQFIRDVFTGWYRRAPGKQRELVARIYEGGNTQYADSAKGRFTISRDNAKKTVYLQMNSLRPEDTALYYCLFSGTISTGREYRSGDYWGQGTLVTVSS

SEQ ID NO: 123 - protein, 124 aa, Artificial Sequence
  F010302338 F0103464B09
EVQLVESGGGVVQPGGSLRLSCAASHRAFIRDVFTGWYRRAPGKQRELVARIYESGNTQYADSAKGRFTISRDNAKKTVYLQMNSLRPEDTALYYCLFSGTISTGREYRSGDYWGQGTLVTVSS

SEQ ID NO: 124 - protein, 124 aa, Artificial Sequence
  F010302339 F0103464B09
EVQLVESGGGVVQPGGSLRLSCAASHRAFIRDVFTGWYRRAPGKQRELVARIYEGGNTQYADSAKGRFTISRDNAKKTVYLQMNSLRPEDTALYYCLFSGTISTGREYRSGDYWGQGTLVTVSS

SEQ ID NO: 125 - protein, 124 aa, Artificial Sequence
  F010302340 F0103464B09
EVQLVESGGGVVQPGGSLRLSCAASHRAFIRDLFTGWYRRAPGKQRELVARIYESGNTNYADSAKGRFTISRDNAKKTVYLQMNSLRPEDTALYYCLFSGTISTGREYRSGDYWGQGTLVTVSS

SEQ ID NO: 126 - protein, 124 aa, Artificial Sequence
  F010302341 F0103464B09
EVQLVESGGGVVQPGGSLRLSCAASSRQFIRDVFTGWYRQAPGKQRELVARIYNEGNTNYADSAKGRFTISRDNAKKTVYLQMNSLRPEDTALYYCLFSGTISTGREYRSGDYWGQGTLVTVSS

SEQ ID NO: 127 - protein, 124 aa, Artificial Sequence
  F010302342 F0103464B09
EVQLVESGGGVVQPGGSLRLSCAASSRQFIRDVFTGWYRQAPGKQRELVARIYNEGNTQYADSAKGRFTISRDNAKKTVYLQMNSLRPEDTALYYCLFSGTISTGREYRSGDYWGQGTLVTVSS

SEQ ID NO: 128 - protein, 124 aa, Artificial Sequence
  F010302343 F0103464B09
EVQLVESGGGVVQPGGSLRLSCAASSRQFIRDVFTGWYRQAPGKQRELVARIYESGNTQYADSAKGRFTISRDNAKKTVYLQMNSLRPEDTALYYCLFSGTISTGREYRSGDYWGQGTLVTVSS

SEQ ID NO: 129 - protein, 124 aa, Artificial Sequence
  F010302344 F0103464B09
EVQLVESGGGVVQPGGSLRLSCAASHRQFIRDVFTGWYRQAPGKQRELVARIYNEGNTQYADSAKGRFTISRDNAKKTVYLQMNSLRPEDTALYYCLFSGTISTGREYRSGDYWGQGTLVTVSS

SEQ ID NO: 130 - protein, 124 aa, Artificial Sequence
  F010302345 F0103464B09
EVQLVESGGGVVQPGGSLRLSCAASHRQFIRDVFTGWYRQAPGKQRELVARIYEGGNTQYADSAKGRFTISRDNAKKTVYLQMNSLRPEDTALYYCLFSGTISTGREYRSGDYWGQGTLVTVSS

SEQ ID NO: 131 - protein, 124 aa, Artificial Sequence
  F010302346 F0103464B09
EVQLVESGGGVVQPGGSLRLSCAASHRAFIRDVFTGWYRQAPGKQRELVARIYESGNTQYADSAKGRFTISRDNAKKTVYLQMNSLRPEDTALYYCLFSGTISTGREYRSGDYWGQGTLVTVSS

SEQ ID NO: 132 - protein, 124 aa, Artificial Sequence
  F010302346 F0103464B09(
EVQLVESGGGVVQPGGSLRLSCAASHRAFIRDVFTGWYRQAPGKQRELVARIYEGGNTQYADSAKGRFTISRDNAKKTVYLQMNSLRPEDTALYYCLFSGTISTGREYRSGDYWGQGTLVTVSS

SEQ ID NO: 133 - protein, 124 aa, Artificial Sequence
  F010302348 F0103464B09
EVQLVESGGGVVQPGGSLRLSCAASHRAFIRDLFTGWYRQAPGKQRELVARIYESGNTNYADSAKGRFTISRDNAKKTVYLQMNSLRPEDTALYYCLFSGTISTGREYRSGDYWGQGTLVTVSS

SEQ ID NO: 134 - protein, 124 aa, Artificial Sequence
  F010302349 F0103464B09
EVQLVESGGGVVQPGGSLRLSCAASSRQFIRDVFTGWYRRAPGKQRELVARIYNEGNTNYADSVKGRFTISRDNAKKTVYLQMNSLRPEDTALYYCLFSGTISTGREYRSGDYWGQGTLVTVSS

SEQ ID NO: 135 - protein, 124 aa, Artificial Sequence
  F010302350 F0103464B09
EVQLVESGGGVVQPGGSLRLSCAASSRQFIRDVFTGWYRRAPGKQRELVARIYNEGNTQYADSVKGRFTISRDNAKKTVYLQMNSLRPEDTALYYCLFSGTISTGREYRSGDYWGQGTLVTVSS

SEQ ID NO: 136 - protein, 124 aa, Artificial Sequence
  F010302351 F0103464B09
EVQLVESGGGVVQPGGSLRLSCAASSRQFIRDVFTGWYRRAPGKQRELVARIYESGNTQYADSVKGRFTISRDNAKKTVYLQMNSLRPEDTALYYCLFSGTISTGREYRSGDYWGQGTLVTVSS

SEQ ID NO: 137 - protein, 124 aa, Artificial Sequence
  F010302352 F0103464B09
EVQLVESGGGVVQPGGSLRLSCAASHRQFIRDVFTGWYRRAPGKQRELVARIYNEGNTQYADSVKGRFTISRDNAKKTVYLQMNSLRPEDTALYYCLFSGTISTGREYRSGDYWGQGTLVTVSS

SEQ ID NO: 138 - protein, 124 aa, Artificial Sequence
  F010302353 F0103464B09
EVQLVESGGGVVQPGGSLRLSCAASHRQFIRDVFTGWYRRAPGKQRELVARIYEGGNTQYADSVKGRFTISRDNAKKTVYLQMNSLRPEDTALYYCLFSGTISTGREYRSGDYWGQGTLVTVSS

SEQ ID NO: 139 - protein, 124 aa, Artificial Sequence
  F010302354 F0103464B09
EVQLVESGGGVVQPGGSLRLSCAASHRAFIRDVFTGWYRRAPGKQRELVARIYESGNTQYADSVKGRFTISRDNAKKTVYLQMNSLRPEDTALYYCLFSGTISTGREYRSGDYWGQGTLVTVSS

SEQ ID NO: 140 - protein, 124 aa, Artificial Sequence
  F010302355 F0103464B09
EVQLVESGGGVVQPGGSLRLSCAASHRAFIRDVFTGWYRRAPGKQRELVARIYEGGNTQYADSVKGRFTISRDNAKKTVYLQMNSLRPEDTALYYCLFSGTISTGREYRSGDYWGQGTLVTVSS

SEQ ID NO: 141 - protein, 124 aa, Artificial Sequence
  F010302356 F0103464B09
EVQLVESGGGVVQPGGSLRLSCAASHRAFIRDLFTGWYRRAPGKQRELVARIYESGNTNYADSVKGRFTISRDNAKKTVYLQMNSLRPEDTALYYCLFSGTISTGREYRSGDYWGQGTLVTVSS

SEQ ID NO: 142 - protein, 124 aa, Artificial Sequence
  F010302357 F0103464B09
EVQLVESGGGVVQPGGSLRLSCAASSRQFIRDVFTGWYRQAPGKQRELVARIYNEGNTNYADSVKGRFTISRDNAKKTVYLQMNSLRPEDTALYYCLFSGTISTGREYRSGDYWGQGTLVTVSS

SEQ ID NO: 143 - protein, 124 aa, Artificial Sequence
  F010302358 F0103464B09
EVQLVESGGGVVQPGGSLRLSCAASSRQFIRDVFTGWYRQAPGKQRELVARIYNEGNTQYADSVKGRFTISRDNAKKTVYLQMNSLRPEDTALYYCLFSGTISTGREYRSGDYWGQGTLVTVSS

SEQ ID NO: 144 - protein, 124 aa, Artificial Sequence
  F010302359 F0103464B09
EVQLVESGGGVVQPGGSLRLSCAASSRQFIRDVFTGWYRQAPGKQRELVARIYESGNTQYADSVKGRFTISRDNAKKTVYLQMNSLRPEDTALYYCLFSGTISTGREYRSGDYWGQGTLVTVSS

SEQ ID NO: 145 - protein, 124 aa, Artificial Sequence
  F010302360 F0103464B09
EVQLVESGGGVVQPGGSLRLSCAASHRQFIRDVFTGWYRQAPGKQRELVARIYNEGNTQYADSVKGRFTISRDNAKKTVYLQMNSLRPEDTALYYCLFSGTISTGREYRSGDYWGQGTLVTVSS

SEQ ID NO: 146 - protein, 124 aa, Artificial Sequence
  F010302361 F0103464B09
EVQLVESGGGVVQPGGSLRLSCAASHRQFIRDVFTGWYRQAPGKQRELVARIYEGGNTQYADSVKGRFTISRDNAKKTVYLQMNSLRPEDTALYYCLFSGTISTGREYRSGDYWGQGTLVTVSS

SEQ ID NO: 147 - protein, 124 aa, Artificial Sequence
  F010302362 F0103464B09
EVQLVESGGGVVQPGGSLRLSCAASHRAFIRDVFTGWYRQAPGKQRELVARIYESGNTQYADSVKGRFTISRDNAKKTVYLQMNSLRPEDTALYYCLFSGTISTGREYRSGDYWGQGTLVTVSS

SEQ ID NO: 148 - protein, 124 aa, Artificial Sequence
  F010302363 F0103464B09
EVQLVESGGGVVQPGGSLRLSCAASHRAFIRDVFTGWYRQAPGKQRELVARIYEGGNTQYADSVKGRFTISRDNAKKTVYLQMNSLRPEDTALYYCLFSGTISTGREYRSGDYWGQGTLVTVSS

SEQ ID NO: 149 - protein, 124 aa, Artificial Sequence
  F010302364 F0103464B09
EVQLVESGGGVVQPGGSLRLSCAASHRAFIRDLFTGWYRQAPGKQRELVARIYESGNTNYADSVKGRFTISRDNAKKTVYLQMNSLRPEDTALYYCLFSGTISTGREYRSGDYWGQGTLVTVSS

SEQ ID NO: 150 - protein, 124 aa, Artificial Sequence
  F010302365 F0103464B09
EVQLVESGGGVVQPGGSLRLSCAASSRAFIRDVFTGWYRRAPGKQRELVARIYNGGNTNYADSAKGRFTISRDNAKKTVYLQMNSLRPEDTALYYCLFSGTISTGREYRSGDYWGQGTLVTVSS

SEQ ID NO: 151 - protein, 124 aa, Artificial Sequence
  F010302366 F0103464B09
EVQLVESGGGVVQPGGSLRLSCAASSRAFIRDVFTGWYRQAPGKQRELVARIYNGGNTNYADSAKGRFTISRDNAKKTVYLQMNSLRPEDTALYYCLFSGTISTGREYRSGDYWGQGTLVTVSS

SEQ ID NO: 152 - protein, 124 aa, Artificial Sequence
  F010302367 F0103464B09
EVQLVESGGGVVQPGGSLRLSCAASSRAFIRDVFTGWYRRAPGKQRELVARIYNGGNTNYADSVKGRFTISRDNAKKTVYLQMNSLRPEDTALYYCLFSGTISTGREYRSGDYWGQGTLVTVSS

SEQ ID NO: 153 - protein, 124 aa, Artificial Sequence
  F010302368 F0103464B09
EVQLVESGGGVVQPGGSLRLSCAASSRAFIRDVFTGWYRQAPGKQRELVARIYNGGNTNYADSVKGRFTISRDNAKKTVYLQMNSLRPEDTALYYCLFSGTISTGREYRSGDYWGQGTLVTVSS

SEQ ID NO: 154 - protein, 120 aa, Artificial Sequence
  F010301656 F0103387G04
EVQLVESGGGLAQPGGSLRLSCAASGPVFNINRMAWYRRAPGKQRELVAYVTPTGDISYTDSVKGRFTISRDGSKRWSLQMNSLTPEDTAVYYCRALLQPDSYSNTRTYWGQGTLVTVSS

SEQ ID NO: 155 - protein, 121 aa, Artificial Sequence
  F010301840 F0103387G04
EVQLVESGGGVVQPGGSLRLSCAASGPVFNINRMAWYRQAPGKQRELVAYVTPTGDISYTDSVKGRFTISRDGSKRTWSLQMNSLRPEDTALYYCRALLQPDSYSNTRTYWGQGTLVTVSS

SEQ ID NO: 156 - protein, 120 aa, Artificial Sequence
  F010301841 F0103387G04
EVQLVESGGGVVQPGGSLRLSCAASGPVFNINRMAWYRQAPGKQRELVAYVTPTGDISYTDSVKGRFTISRDGSKRWSLQMNSLRPEDTALYYCRALLQPDSYSNTRTYWGQGTLVTVSS

SEQ ID NO: 157 - protein, 120 aa, Artificial Sequence
  F010301842 F0103387G04
EVQLVESGGGVVQPGGSLRLSCAASGPVFNINRMAWYRQAPGKQRELVAYVTPTGDISYADSVKGRFTISRDGSKRWSLQMNSLRPEDTALYYCRALLQPDSYSNTRTYWGQGTLVTVSS

SEQ ID NO: 158 - protein, 120 aa, Artificial Sequence
  F010301843 F0103387G04
EVQLVESGGGVVQPGGSLRLSCAASGPVFNINRMAWYRQAPGKQRELVAYVTPTGDISYTDSVKGRFTISRDNSKRWSLQMNSLRPEDTALYYCRALLQPDSYSNTRTYWGQGTLVTVSS

SEQ ID NO: 159 - protein, 120 aa, Artificial Sequence
  F010301844 F0103387G04
EVQLVESGGGVVQPGGSLRLSCAASGPVFNINRMAWYRQAPGKQRELVAYVTPTGDISYTDSVKGRFTISRDGSKNWSLQMNSLRPEDTALYYCRALLQPDSYSNTRTYWGQGTLVTVSS

SEQ ID NO: 160 - protein, 120 aa, Artificial Sequence
  F010301845 F0103387G04
EVQLVESGGGVVQPGGSLRLSCAASGPVFNINRMAWYRQAPGKQRELVAYVTPTGDISYTDSVKGRFTISRDGSKRVSLQMNSLRPEDTALYYCRALLQPDSYSNTRTYWGQGTLVTVSS

SEQ ID NO: 161 - protein, 120 aa, Artificial Sequence
  F010301846 F0103387G04
EVQLVESGGGVVQPGGSLRLSCAASGPVFNINRMAWYRQAPGKQRELVAYVTPTGDISYTDSVKGRFTISRDGSKRWYLQMNSLRPEDTALYYCRALLQPDSYSNTRTYWGQGTLVTVSS

SEQ ID NO: 162 - protein, 120 aa, Artificial Sequence
  F010301847 F0103387G04
EVQLVESGGGVVQPGGSLRLSCAASGPVFNINRMAWYRQAPGKQRELVAYVTPTGDISYADSVKGRFTISRDNSKNVYLQMNSLRPEDTALYYCRALLQPDSYSNTRTYWGQGTLVTVSS

SEQ ID NO: 163 - protein, 120 aa, Artificial Sequence
  F010301847 F0103387G04
EVQLVESGGGVVQPGGSLRLSCAASGPVFNINRMAWYRQAPGKQRELVAYVTPTGDISYADSVKGRFTISRDNSKRVYLQMNSLRPEDTALYYCRALLQPDSYSNTRTYWGQGTLVTVSS

SEQ ID NO: 164 - protein, 119 aa, Artificial Sequence
  F010301865 F0103387G04
EVQLVESGGGVVQPGGSLRLSCAASGPVFNINRMAWYRQAPGKQRELVAYVTPTGDISYADSVKGRFTISRDGSKRVYLQMNSLRPEDTALYYCRALLQPDSYSNTRTYWGQGTLVTVS

SEQ ID NO: 165 - protein, 120 aa, Artificial Sequence
  F010301866 F0103387G04
EVQLVESGGGVVQPGGSLRLSCAASGPVFNINRMAWYRQAPGKQRELVAYVTPTGDISYADSVKGRFTISRDGSKNVYLQMNSLRPEDTALYYCRALLQPDSYSNTRTYWGQGTLVTVSS

SEQ ID NO: 166 - protein, 120 aa, Artificial Sequence
  F010302310 F0103387G04
EVQLVESGGGVVQPGGSLRLSCAASGPVFNINRMAWYRQAPGKQRELVAYVTPTGDISYADSVKGRFTISRDASKRVYLQMNSLRPEDTALYYCRALLQPRRYSNTRTYWGQGTLVTVSS

SEQ ID NO: 167 - protein, 120 aa, Artificial Sequence
  F010302311 F0103387G04
EVQLVESGGGVVQPGGSLRLSCAASGPVFNINRMAWYRQAPGKQRELVAYVTPTGDISYADSVKGRFTISRDRSKRVYLQMNSLRPEDTALYYCRALLQPRRYSNTRTYWGQGTLVTVSS

SEQ ID NO: 168 - protein, 120 aa, Artificial Sequence
  F010302312 F0103387G04
EVQLVESGGGVVQPGGSLRLSCAASGPVFNINRMAWYRQAPGKQRELVAYVTPTGDISYADSVKGRFTISRDGSKRVYLQMNSLRPEDTALYYCRALLQPDSYSITRTYWGQGTLVTVSS

SEQ ID NO: 169 - protein, 120 aa, Artificial Sequence
  F010302313 F0103387G04
EVQLVESGGGVVQPGGSLRLSCAASGPVFNINRMAWYRQAPGKQRELVAYVTPTGDISYADSVKGRFTISRDASKRVYLQMNSLRPEDTALYYCRALLQPDSYSITRTYWGQGTLVTVSS

SEQ ID NO: 170 - protein, 120 aa, Artificial Sequence
  F010302314 F0103387G04
EVQLVESGGGVVQPGGSLRLSCAASGPVFNINRMAWYRQAPGKQRELVAYVTPTGDISYADSVKGRFTISRDRSKRVYLQMNSLRPEDTALYYCRALLQPDSYSITRTYWGQGTLVTVSS

SEQ ID NO: 171 - protein, 120 aa, Artificial Sequence
  F010302315 F0103387G04
EVQLVESGGGVVQPGGSLRLSCAASGPVFNINRMAWYRQAPGKQRELVAYVTPTGDISYADSVKGRFTISRDGSKRVYLQMNSLRPEDTALYYCRALLQPRSYSITRTYWGQGTLVTVSS

SEQ ID NO: 172 - protein, 120 aa, Artificial Sequence
  F010302316 F0103387G04
EVQLVESGGGVVQPGGSLRLSCAASGPVFNINRMAWYRQAPGKQRELVAYVTPTGDISYADSVKGRFTISRDASKRVYLQMNSLRPEDTALYYCRALLQPRSYSITRTYWGQGTLVTVSS

SEQ ID NO: 173 - protein, 120 aa, Artificial Sequence
  F010302317 F0103387G04
EVQLVESGGGVVQPGGSLRLSCAASGPVFNINRMAWYRQAPGKQRELVAYVTPTGDISYADSVKGRFTISRDRSKRVYLQMNSLRPEDTALYYCRALLQPRSYSITRTYWGQGTLVTVSS

SEQ ID NO: 174 - protein, 120 aa, Artificial Sequence
  F010302318 F0103387G04
EVQLVESGGGVVQPGGSLRLSCAASGPVFNINRMAWYRQAPGKQRELVAYVTPTGDISYADSVKGRFTISRDGSKRVYLQMNSLRPEDTALYYCRALLQPDRYSITRTYWGQGTLVTVSS

SEQ ID NO: 175 - protein, 120 aa, Artificial Sequence
  F010302319 F0103387G04
EVQLVESGGGVVQPGGSLRLSCAASGPVFNINRMAWYRQAPGKQRELVAYVTPTGDISYADSVKGRFTISRDASKRVYLQMNSLRPEDTALYYCRALLQPDRYSITRTYWGQGTLVTVSS

SEQ ID NO: 176 - protein, 120 aa, Artificial Sequence
  F010302320 F0103387G04
EVQLVESGGGVVQPGGSLRLSCAASGPVFNINRMAWYRQAPGKQRELVAYVTPTGDISYADSVKGRFTISRDASKRVYLQMNSLRPEDTALYYCRALLQPDSYSNTRTYWGQGTLVTVSS

SEQ ID NO: 177 - protein, 120 aa, Artificial Sequence
  F010302321 F0103387G04
EVQLVESGGGVVQPGGSLRLSCAASGPVFNINRMAWYRQAPGKQRELVAYVTPTGDISYADSVKGRFTISRDRSKRVYLQMNSLRPEDTALYYCRALLQPDRYSITRTYWGQGTLVTVSS

SEQ ID NO: 178 - protein, 120 aa, Artificial Sequence
  F010302322 F0103387G04
EVQLVESGGGVVQPGGSLRLSCAASGPVFNINRMAWYRQAPGKQRELVAYVTPTGDISYADSVKGRFTISRDGSKRVYLQMNSLRPEDTALYYCRALLQPRRYSITRTYWGQGTLVTVSS

SEQ ID NO: 179 - protein, 120 aa, Artificial Sequence
  F010302323 F0103387G04
EVQLVESGGGVVQPGGSLRLSCAASGPVFNINRMAWYRQAPGKQRELVAYVTPTGDISYADSVKGRFTISRDASKRVYLQMNSLRPEDTALYYCRALLQPRRYSITRTYWGQGTLVTVSS

SEQ ID NO: 180 - protein, 120 aa, Artificial Sequence
  F010302324 F0103387G04
EVQLVESGGGVVQPGGSLRLSCAASGPVFNINRMAWYRQAPGKQRELVAYVTPTGDISYADSVKGRFTISRDRSKRVYLQMNSLRPEDTALYYCRALLQPRRYSITRTYWGQGTLVTVSS

SEQ ID NO: 181 - protein, 120 aa, Artificial Sequence
  F010302325 F0103387G04
EVQLVESGGGVVQPGGSLRLSCAASGPVFNINRMAWYRQAPGKQRELVAYVTPTGDISYADSVKGRFTISRDRSKRVYLQMNSLRPEDTALYYCRALLQPDSYSNTRTYWGQGTLVTVSS

SEQ ID NO: 182 - protein, 120 aa, Artificial Sequence
  >F010302326 F0103387G04
EVQLVESGGGVVQPGGSLRLSCAASGPVFNINRMAWYRQAPGKQRELVAYVTPTGDISYADSVKGRFTISRDGSKRVYLQMNSLRPEDTALYYCRALLQPRSYSNTRTYWGQGTLVTVSS

SEQ ID NO: 183 - protein, 120 aa, Artificial Sequence
  F010302327 F0103387G04
EVQLVESGGGVVQPGGSLRLSCAASGPVFNINRMAWYRQAPGKQRELVAYVTPTGDISYADSVKGRFTISRDASKRVYLQMNSLRPEDTALYYCRALLQPRSYSNTRTYWGQGTLVTVSS

SEQ ID NO: 184 - protein, 120 aa, Artificial Sequence
  F010302328 F0103387G04
EVQLVESGGGVVQPGGSLRLSCAASGPVFNINRMAWYRQAPGKQRELVAYVTPTGDISYADSVKGRFTISRDRSKRVYLQMNSLRPEDTALYYCRALLQPRSYSNTRTYWGQGTLVTVSS

SEQ ID NO: 185 - protein, 120 aa, Artificial Sequence
  F010302329 F0103387G04(
EVQLVESGGGVVQPGGSLRLSCAASGPVFNINRMAWYRQAPGKQRELVAYVTPTGDISYADSVKGRFTISRDGSKRVYLQMNSLRPEDTALYYCRALLQPDRYSNTRTYWGQGTLVTVSS

SEQ ID NO: 186 - protein, 120 aa, Artificial Sequence
  F010302330 F0103387G04
EVQLVESGGGVVQPGGSLRLSCAASGPVFNINRMAWYRQAPGKQRELVAYVTPTGDISYADSVKGRFTISRDASKRVYLQMNSLRPEDTALYYCRALLQPDRYSNTRTYWGQGTLVTVSS

SEQ ID NO: 187 - protein, 120 aa, Artificial Sequence
  F010302331 F0103387G04
EVQLVESGGGVVQPGGSLRLSCAASGPVFNINRMAWYRQAPGKQRELVAYVTPTGDISYADSVKGRFTISRDRSKRVYLQMNSLRPEDTALYYCRALLQPDRYSNTRTYWGQGTLVTVSS

SEQ ID NO: 188 - protein, 120 aa, Artificial Sequence
  F010302332 F0103387G04
EVQLVESGGGVVQPGGSLRLSCAASGPVFNINRMAWYRQAPGKQRELVAYVTPTGDISYADSVKGRFTISRDGSKRVYLQMNSLRPEDTALYYCRALLQPRRYSNTRTYWGQGTLVTVSS

SEQ ID NO: 189 - protein, 120 aa, Artificial Sequence
  F010302370 F0103387G04
EVQLVESGGGVVQPGGSLRLSCAASGPVFNINRMAWYRQAPGKQRELVAYVTPTGDISYADSVKGRFTISRDRSKRVYLQMNSLRPEDTALYYCRALLQPSSYSITRTYWGQGTLVTVSS

SEQ ID NO: 190 - protein, 123 aa, Artificial Sequence
  F010302371 F0103387G04
FFGEVQLVESGGGVVQPGGSLRLSCAASGPVFNINRMAWYRQAPGKQRELVAYVTPTGDISYADSVKGRFTISRDRSKRVYLQMNSLRPEDTALYYCRALLQPNVYSITRTYWGQGTLVTVSS

SEQ ID NO: 191 - protein, 120 aa, Artificial Sequence
  F010302372 F0103387G04
EVQLVESGGGVVQPGGSLRLSCAASGPVFNINRMAWYRQAPGKQRELVAYVTPTGDISYADSVKGRFTISRDRSKRVYLQMNSLRPEDTALYYCRALLQPDVYSITRTYWGQGTLVTVSS

SEQ ID NO: 192 - protein, 120 aa, Artificial Sequence
  F010302383 F0103387G04
EVQLVESGGGVVQPGGSLRLSCAASGPVFNINRMAWYRQAPGKQRELVAYVTPTGDISYADSVKGRFTISRGGSKRVYLQMNSLRPEDTALYYCRALLQPSSYSGTRTYWGQGTLVTVSS

SEQ ID NO: 193 - protein, 120 aa, Artificial Sequence
  F010302384 F0103387G04
EVQLVESGGGVVQPGGSLRLSCAASGPVFNINRMAWYRQAPGKQRELVAYVTPTGDISYADSVKGRFTISRGGSKRVYLQMNSLRPEDTALYYCRALLQPSSYSITRTYWGQGTLVTVSS

SEQ ID NO: 194 - protein, 120 aa, Artificial Sequence
  F010302385 F0103387G04
EVQLVESGGGVVQPGGSLRLSCAASGPVFNINRMAWYRQAPGKQRELVAYVTPTGDISYADSVKGRFTISRQGSKRVYLQMNSLRPEDTALYYCRALLQPSSYSGTRTYWGQGTLVTVSS

SEQ ID NO: 195 - protein, 120 aa, Artificial Sequence
  F010302386 F0103387G04
EVQLVESGGGVVQPGGSLRLSCAASGPVFNINRMAWYRQAPGKQRELVAYVTPTGDISYADSVKGRFTISRQGSKRVYLQMNSLRPEDTALYYCRALLQPSSYSITRTYWGQGTLVTVSS

SEQ ID NO: 196 - protein, 10 aa, Artificial Sequence
  F0103275B05-CDR1
GSIFNINSMA

SEQ ID NO: 197 - protein, 10 aa, Artificial Sequence
  F0103275B05-CDR1-A
GSIFNINRMA

SEQ ID NO: 198 - protein, 9 aa, Artificial Sequence
  F0103275B05-CDR2
SSTNGGSTN

SEQ ID NO: 199 - protein, 9 aa, Artificial Sequence
  F0103275B05-CDR2-A
YSTNGGDTN

SEQ ID NO: 200 - protein, 13 aa, Artificial Sequence
  F0103275B05-CDR3
LLQPSIYDISRTY

SEQ ID NO: 201 - protein, 10 aa, Artificial Sequence
  F0103387G05-CDR1
GRILRIGYMR

SEQ ID NO: 202 - protein, 9 aa, Artificial Sequence
  F0103387G05-CDR2
RITDDSATD

SEQ ID NO: 203 - protein, 9 aa, Artificial Sequence
  F0103387G05-CDR2-A
RITGGSATG

SEQ ID NO: 204 - protein, 9 aa, Artificial Sequence
  F0103387G05-CDR2-B
RITDDSATG

SEQ ID NO: 205 - protein, 9 aa, Artificial Sequence
  F0103387G05-CDR2-C
RITGGSATG

SEQ ID NO: 206 - protein, 16 aa, Artificial Sequence
  F0103387G05-CDR3
LVTASVRGGSIHSGTY

SEQ ID NO: 207 - protein, 11 aa, Artificial Sequence
  F0103464B09-CDR1
SRAFIRDVFTG

SEQ ID NO: 208 - protein, 11 aa, Artificial Sequence
  F0103464B09-CDR1-A
SRAFIRDLFTG

SEQ ID NO: 209 - protein, 11 aa, Artificial Sequence
  F0103464B09-CDR1-B
SRQFIRDVFTG

SEQ ID NO: 210 - protein, 11 aa, Artificial Sequence
  F0103464B09-CDR1-C
HRQFIRDVFTG

SEQ ID NO: 211 - protein, 11 aa, Artificial Sequence
  F0103464B09-CDR1-D
HRAFIRDVFTG

SEQ ID NO: 212 - protein, 11 aa, Artificial Sequence
  F0103464B09-CDR1-E
HRAFIRDLFTG

SEQ ID NO: 213 - protein, 9 aa, Artificial Sequence
  F0103464B09-CDR2
RIYNGGNTN

SEQ ID NO: 214 - protein, 9 aa, Artificial Sequence
  F0103464B09-CDR2-A
RIYNEGNTN

SEQ ID NO: 215 - protein, 9 aa, Artificial Sequence
  F0103464B09-CDR2-B
RIYNEGNTQ

SEQ ID NO: 216 - protein, 9 aa, Artificial Sequence
  F0103464B09-CDR2-C
RIYESGNTQ

SEQ ID NO: 217 - protein, 9 aa, Artificial Sequence
  F0103464B09-CDR2-
RIYESGNTN

SEQ ID NO: 218 - protein, 9 aa, Artificial Sequence
  F0103464B09-CDR2-E
RIYNEGNTN

SEQ ID NO: 219 - protein, 15 aa, Artificial Sequence
  F0103464B09-CDR3
SGTINTGREYRSGDY

SEQ ID NO: 220 - protein, 15 aa, Artificial Sequence
  F0103464B09-CDR3-A
SGTISTGREYRSGDY

SEQ ID NO: 221 - protein, 10 aa, Artificial Sequence
  F0103387G04-CDR1
GPVFNINKMA

SEQ ID NO: 222 - protein, 10 aa, Artificial Sequence
  F0103387G04-CDR1-A
GPVFNINRMA

SEQ ID NO: 223 - protein, 9 aa, Artificial Sequence
  F0103387G04-CDR2
SVTPTGSIS

SEQ ID NO: 224 - protein, 9 aa, Artificial Sequence
  F0103387G04-CDR2-A
YVTPTGDIS

SEQ ID NO: 225 - protein, 13 aa, Artificial Sequence
  F0103387G04-CDR3
LLQPDSYSNTRTY

SEQ ID NO: 226 - protein, 13 aa, Artificial Sequence
  F0103387G04-CDR3-A
LLQPRRYSNTRTY

SEQ ID NO: 227 - protein, 13 aa, Artificial Sequence
  F0103387G04-CDR3-B
LLQPDSYSITRTY

SEQ ID NO: 228 - protein, 13 aa, Artificial Sequence
  F0103387G04-CDR3-C
LLQPRSYSITRTY

SEQ ID NO: 229 - protein, 13 aa, Artificial Sequence
  F0103387G04-CDR3-B
LLQPRSYSNTRTY

SEQ ID NO: 230 - protein, 13 aa, Artificial Sequence
  F0103387G04-CDR3-E
LLQPSSYSITRTY

SEQ ID NO: 231 - protein, 13 aa, Artificial Sequence
  F0103387G04-CDR3-F
LLQPNVYSITRTY

SEQ ID NO: 232 - protein, 13 aa, Artificial Sequence
  F0103387G04-CDR3-G
LLQPDVYSITRTY

SEQ ID NO: 233 - protein, 13 aa, Artificial Sequence
  F0103387G04-CDR3-H
LLQPSSYSGTRTY

SEQ ID NO: 234 - protein, 115 aa, Artificial Sequence
  ALB11002 ( "ALB201") without C-terminal A,
  MISC_FEATURE (11)..(11): X = is L or V,
  MISC_FEATURE (93)..(93): X= is V or L
EVQLVESGGGXVQPGNSLRLSCAASGFTFSSFGMSWVRQAPGKGLEWVSSISGSGSDTLYADSVKGRFTISRDNAKTTLYLQMNSLRPEDTAXYYCTIGGSLSRSSQGTLVTVSS

SEQ ID NO: 235 - protein, 10 aa, Artificial Sequence
  HSA-CDR1
GFTFSSFGMS

SEQ ID NO: 236 - protein, 10 aa, Artificial Sequence
  HSA-CDR2
SISGSGSDTL

SEQ ID NO: 237 - protein, 6 aa, Artificial Sequence
  HSA-CDR3
GGSLSR

SEQ ID NO: 238 - protein, 116 aa, Artificial Sequence
  ALB11002 ( "ALB201"),
  MISC_FEATURE (11)..(11): X is L or V
  MISC_FEATURE (93)..(93): X is  V or L
EVQLVESGGGXVQPGNSLRLSCAASGFTFSSFGMSWVRQAPGKGLEWVSSISGSGSDTLYADSVKGRFTISRDNAKTTLYLQMNSLRPEDTAXYYCTIGGSLSRSSQGTLVTVSSA

SEQ ID NO: 239 - protein, 115 aa, Artificial Sequence
  ALB11002 ( "ALB201") E1D L11V L93V without C-terminal A
DVQLVESGGGVVQPGNSLRLSCAASGFTFSSFGMSWVRQAPGKGLEWVSSISGSGSDTLYADSVKGRFTISRDNAKTTLYLQMNSLRPEDTALYYCTIGGSLSRSSQGTLVTVSS

SEQ ID NO: 240 - protein, 116 aa, Artificial Sequence
  ALB11002 ( "ALB201") E1D L11V L93V
DVQLVESGGGVVQPGNSLRLSCAASGFTFSSFGMSWVRQAPGKGLEWVSSISGSGSDTLYADSVKGRFTISRDNAKTTLYLQMNSLRPEDTALYYCTIGGSLSRSSQGTLVTVSSA

SEQ ID NO: 241 - protein, 115 aa, Artificial Sequence [sequence omitted]

SEQ ID NO: 242 - protein, 115 aa, Artificial Sequence [sequence omitted]

SEQ ID NO: 243 - protein, 9 aa, Artificial Sequence
  9GS-linker
GGGGSGGGS

SEQ ID NO: 244 - protein, 20 aa, Artificial Sequence
  20GS linker
GGGGSGGGGSGGGGSGGGGS

SEQ ID NO: 245 - protein, 35 aa, Artificial Sequence
  35GS linker
GGGGSGGGGSGGGGSGGGGSGGGGSGGGGSGGGGS

SEQ ID NO: 246 - protein, 4 aa, Artificial Sequence
  Linker subunit
GGGS

SEQ ID NO: 247 - protein, 10 aa, Artificial Sequence
  F0103262B06-CDR1
TRTFSTYAMG

SEQ ID NO: 248 - protein, 11 aa, Artificial Sequence
  F0103262B06-CDR2
HINFSGSSTRY

SEQ ID NO: 249 - protein, 14 aa, Artificial Sequence
  F0103262B06-CDR3
ARWVAGPPRYDYEY

SEQ ID NO: 250 - protein, 10 aa, Artificial Sequence
  F0103262C02-CDR1
GLPFGLYILG

SEQ ID NO: 251 - protein, 10 aa, Artificial Sequence
  F0103262C02-CDR2
AISRSGRDTV

SEQ ID NO: 252 - protein, 17 aa, Artificial Sequence
  F0103262C02-CDR3
DSVPRGTPTITESEYAI

SEQ ID NO: 253 - protein, 10 aa, Artificial Sequence
  F0103265A11-CDR1
GMLFNANTQG

SEQ ID NO: 254 - protein, 9 aa, Artificial Sequence
  F0103265A11-CDR2
FIFSGGYTN

SEQ ID NO: 255 - skipped

SEQ ID NO: 256 - protein, 10 aa, Artificial Sequence
  F0103265B04-CDR1
SFIFSNNYME

SEQ ID NO: 257 - protein, 9 aa, Artificial Sequence
  F0103265B04-CDR2
RITGRGNTN

SEQ ID NO: 258 - protein, 7 aa, Artificial Sequence
  F0103265B04-CDR3
LWYGGRA

SEQ ID NO: 259 - protein, 10 aa, Artificial Sequence
  F0103362B08-CDR1
VRPFSTSAMG

SEQ ID NO: 260 - protein, 10 aa, Artificial Sequence
  F0103362B08-CDR2
GILWNGIVTY

SEQ ID NO: 261 - protein, 16 aa, Artificial Sequence
  F0103362B08-CDR3
DRDYGGRSFSAYEYEY

SEQ ID NO: 262 - protein, 10 aa, Artificial Sequence
  F0103454D07-CDR1
GGIININYIA

SEQ ID NO: 263 - protein, 9 aa, Artificial Sequence
  F0103454D07-CDR2
RISSDDTIK

SEQ ID NO: 264 - protein, 12 aa, Artificial Sequence
  F0103454D07-CDR3
LITPWTGDTRTY

SEQ ID NO: 265 - protein, 116 aa, Artificial Sequence
  ALB00223
EVQLVESGGGVVQPGGSLRLSCAASGFTFRSFGMSWVRQAPGKGPEWVSSISGSGSDTLYADSVKGRFTISRDNSKNTLYLQMNSLRPEDTALYYCTIGGSLSRSSQGTLVTVSSA

SEQ ID NO: 266 - protein, 115 aa, Artificial Sequence
  ALB00223 without C-terminal A
EVQLVESGGGVVQPGGSLRLSCAASGFTFRSFGMSWVRQAPGKGPEWVSSISGSGSDTLYADSVKGRFTISRDNSKNTLYLQMNSLRPEDTALYYCTIGGSLSRSSQGTLVTVSS

SEQ ID NO: 267 - protein, 10 aa, Artificial Sequence
  ALB00223-HSA-CDR1
GFTFRSFGMS

SEQ ID NO: 268 - protein, 25 aa, Artificial Sequence
  VHH2-consensus Framework 1
QVQLVESGGGLVQAGGSLRLSCAAS

SEQ ID NO: 269 - protein, 14 aa, Artificial Sequence
  VHH2-consensus Framework 2
WYRQAPGKQRELVA

SEQ ID NO: 270 - protein, 39 aa, Artificial Sequence
  VHH2-consensus Framework 3
YADSVKGRFTISRDNAKNTLYLQMNSLKPEDTAVYYCNA

SEQ ID NO: 271 - protein, 11 aa, Artificial Sequence
  VHH2-consensus Framework
WGQGTLVTVSS

SEQ ID NO: 272 - DNA, 102 bp, Artificial Sequence
  Nucleotide sequence of FLAG-HIS6 peptide
gcggccgcagattataaagatcatgatggcgattataaagatcatgatattgattataaagatgatgatgataaaggggccgcacatcatcatcatcatcat

SEQ ID NO: 273 - DNA, 366 bp, Artificial Sequence
  Nucleotide sequence of F0103262B06
gaggtgcaattggtggagtctgggggaggtttggtgcagcctgggggctctctgagactctcgtgtgctgggtctacacgcacgtttagcacctatgccatgggctggttccgccaggctccagggagggagcgtgagtttgtagcacatattaattttagcggtagtagcacaaggtatgcagactccgtgaagggccgattcaccatctccagagacaacgccaagaatatgggatatctgcagatgaatagcctgaaacctgaggacacggccgtttattattgtgcagcccggtgggtcgctggccctccgaggtatgactatgagtactggggccaggggaccctggtcaccgtctcctca

SEQ ID NO: 274 - DNA, 378 bp, Artificial Sequence
  Nucleotide sequence of F0103262C02
gaggtgcaattggtggagtctgggggaggattggtgcaggctgggggctctctgacactctcctgtgcagcctctggtctgcccttcggattgtatattctgggctggatccgccgggctccagggaaggagcgtgattttgtagcagctattagccggagtggtagggacacggtttatgcaaactccgtgaagggccgattcaccatctccagagacaacgccaagaacatggtgtacctgcgaatggacaatctgagaccggaggacacggccgcatattactgtgcagtggactcagtgccacgcggaactcctaccatcacagagtctgagtacgccatctggggccaggggaccctggtcaccgtctcctca

SEQ ID NO: 275 - DNA, 333 bp, Artificial Sequence
  Nucleotide sequence of F0103265A11
gaggtgcaattggtggagtctgggggaggcttggtgcagcctggagggtctctgagactctcctgtgcagcctctggaatgctcttcaacgccaatacccagggctggtaccgccaggctccagggaagcagcgcgaattggtcgcatttatttttagtggtggttacacaaactatgtagactccgtgaagggccgtttcaccatctccagagacaacgccaagcgcacaatgtatctgcagatgaacagcctgaaacctgaggactcggccatctattactgctcattgagtcgctacttgggccaggggaccctggtcaccgtctcctca

SEQ ID NO: 276 - DNA, 345 bp, Artificial Sequence
  Nucleotide sequence of F0103265B04
gaggtgcaattggtggagtctgggggaggcttggtgcagcctggggggtctctgagactctcctgtgcagcccctagtttcatcttcagcaacaattacatggagtggtaccggcaggctccagggaagcagcgcgactgggtcgcacgtattacaggtcgcggtaacacaaactatctggactccgtgaagggccgattcaccatctccagagacgacgccaagaatacggtgtatctagaaatcgacagcctgaaacctgaggacacggccgtctattactgtagtgcactctggtacggcgggcgcgcatggggcaaagggaccctggtcaccgtctcctca

SEQ ID NO: 277 - DNA, 360 bp, Artificial Sequence
  Nucleotide sequence of F0103275B05
gaggtgcaattggtggagtctgggggaggcttggtgcagcctggggggtctctgagactctcctgtgcagcctctggaagcatcttcaatatcaacagtatggcctggtatcgccgggctccagggaagcagcgcgaattggtcgcaagtagcaccaatggtggtagtacaaactatgcagactccgtgaagggccgattcaccatctctagagacaacgccaaacgggtgtatctgcaaatgaacagcctgacacctgaggacacggccgtctattattgtaatgcactgctacaaccgtcgatttatgacattagtcgcacatattggggccaggggaccctggtcaccgtctcctca

SEQ ID NO: 278 - DNA, 375 bp, Artificial Sequence
  Nucleotide sequence of F0103362B08
gaggtgcaattggtggagtctgggggaggattggtgcaggctgggggctctctgagactctcctgtgcagcctctgtacgtcccttcagtacctcagccatgggctggttccgccaggctccagagaaggagcgtgaggctgtagcaggtattctgtggaatggtattgtcacatactatgcagactccgtgaagggccgattcaccatctccagagacaacgccaagaatgaagtatatctgcaaatgaacaaactgaaacccgaggacacggccgtttattattgtgcattagatagagattatggtgggcgatctttttcggcatatgaatatgagtactggggccaggggaccctggtcaccgtctcctca

SEQ ID NO: 279 - DNA, 360 bp, Artificial Sequence
  Nucleotide sequence of F0103387G04
gaggtgcaattggtggagtctgggggaggcttggcgcagcctggggggtctctgagactctcctgtgcagcctctggacccgtcttcaatatcaacaagatggcctggtaccgccgggctccagggaagcagcgcgaattggtcgcaagtgtcacccctactggtagtataagttatactgactccgtgaagggccgattcaccatttctagagacggctccaagcggtggtctctacaaatgaacagcctgacacctgaggacacggccgtctattactgtaacgctttactacaaccggatagttattctaatacgcgcacatattggggccaggggaccctggtcaccgtctcctca

SEQ ID NO: 280 - DNA, 372 bp, Artificial Sequence
  Nucleotide sequence of F0103387G04
gaggtgcaattggtggagtctgggggaggcttggtgcaggctggggggtcactgagactctcctgtgacgcctctggaaggatcctccgtatcggctacatgaggtggcaccgccagggtgcagggaagcagcgcgagtttgtcgcgcgtattactgatgatagtgctacagactatgcagactccgtgaagggccgattcaccatctccagagacaacgccaagaacacggtgtatctgcaaatgaacaacctgaatcctgaggacacggccgtctattattgtgaggcgttggtgactgcgagtgtacgtggtgggagtatacattctggtacctattggggccgggggaccctggtcaccgtctcctca

SEQ ID NO: 281 - DNA, 360 bp, Artificial Sequence
  Nucleotide sequence of F0103454D07
gaggtgcaattggtggagtctgggggaggattggtgcagcctggaggatcacttagactgtcctgtgtagcctccgggggcatcatcaatatcaattacattgcctggtaccgccagactccagggaagcagcgcgacttggtcgctcgtattagtagtgatgatacaataaagtatggcgactccgtgaagggccgattcgccatgtccagagacaaggtcaagaatatggtgcatctacaaatgaacagcctgactaccgaggacacaggtgtctatgtctgttcagccctcatcacgccttggacaggagacacccggacctattggggccgggggaccctggtcaccgtctcctca

SEQ ID NO: 282 - DNA, 372 bp, Artificial Sequence
  Nucleotide sequence of F0103464B09
gaggtgcaattggtggagtctgggggaggattggtgcagcctggaggatcactaagactgtcctgtgcaacaacctctagagctttcatcagggacgttttcacgggctggtatcgccgggttcccgggaaggagcgcgaattggtcgctcgcatttacaatggcggtaacacaaattatgcagacttcgcgaagggccgattctccatctccagggacaacgccaagaagatggtgactctgagaatgagcaatctgaaacctgaggacacaggggtctattactgccttttttcgggtacaatcaatactggcagagagtatcggtctggagactactggggccaggggaccctggtcaccgtctcctca

SEQ ID NO: 283 - DNA, 360 bp, Artificial Sequence
  Nucleotide sequence of F0103464B09
gaggtgcaattggtggagtctgggggaggcttggtgcagcctggggggtctctgagactctcctgtgcagcctctggaagcatcttcaatatcaaccgcatggcctggtatcgccgggctccagggaagcagcgcgaattggtcgcatatagcaccaatggtggtgatacaaactatgcagactccgtgaagggccgattcaccatcagcagagacaacgccaaacgggtgtatctgcaaatgaacagcctgacacctgaggacacggccgtctattattgtcgcgcactgctacaaccgtcgatttatgacattagtcgcacatattggggccaggggaccctggtcaccgtctcctca

SEQ ID NO: 284 - DNA, 360 bp, Artificial Sequence
  Nucleotide sequence of F010301635
gaggtgcaattggtggagtctgggggaggcgttgtgcagcctggggggtctctgagactctcctgtgcagcctctggaagcatcttcaatatcaacagtatggcctggtatcgccaggctccagggaagcagcgcgaattggtcgcaagtagcaccaatggtggtagtacaaactatgcagactccgtgaagggccgattcaccatctccagagacaacgccaaacgggtgtatctgcaaatgaacagcctgcgccctgaggacacggccctgtattattgtaatgcactgctacaaccgtcgatttatgacattagtcgcacatattggggccaggggaccctggtcaccgtctcctca

SEQ ID NO: 285 - DNA, 360 bp, Artificial Sequence
  Nucleotide sequence of F010301636
gaggtgcaattggtggagtctgggggaggcgttgtgcagcctggggggtctctgagactctcctgtgcagcctctggaagcatcttcaatatcaacagtatggcctggtatcgccgggctccagggaagcagcgcgaattggtcgcaagtagcaccaatggtggtagtacaaactatgcagactccgtgaagggccgattcaccatctccagagacaacgccaaaaacgtgtatctgcaaatgaacagcctgcgccctgaggacacggccctgtattattgtaatgcactgctacaaccgtcgatttatgacattagtcgcacatattggggccaggggaccctggtcaccgtctcctca

SEQ ID NO: 286 - DNA, 360 bp, Artificial Sequence
  Nucleotide sequence of F010301637
gaggtgcaattggtggagtctgggggaggcgttgtgcagcctggggggtctctgagactctcctgtgcagcctctggaagcatcttcaatatcaacagtatggcctggtatcgccgggctccagggaagcagcgcgaattggtcgcaagtagcaccaatggtggtagtacaaactatgcagactccgtgaagggccgattcaccatctccagagacaacgccaaacgggtgtatctgcaaatgaacagcctgcgccctgaggacacggccctgtattattgtaatgcactgctacaaccgtcgatttatgacattagtcgcacatattggggccaggggaccctggtcaccgtctcctca

SEQ ID NO: 287 - DNA, 360 bp, Artificial Sequence
  Nucleotide sequence of F010301638
gaggtgcaattggtggagtctgggggaggcgttgtgcagcctggggggtctctgagactctcctgtgcagcctctggaagcatcttcaatatcaacagtatggcctggtatcgccaggctccagggaagcagcgcgaattggtcgcaagtagcaccaatggtggtagtacaaactatgcagactccgtgaagggccgattcaccatctccagagacaacgccaaaaacgtgtatctgcaaatgaacagcctgcgccctgaggacacggccctgtattattgtaatgcactgctacaaccgtcgatttatgacattagtcgcacatattggggccaggggaccctggtcaccgtctcctca

SEQ ID NO: 288 - DNA, 363 bp, Artificial Sequence
  Nucleotide sequence of F010301639
gaggtgcaattggtggagtctgggggaggcgttgtgcagcctggggggtctctgagactctcctgtgcagcctctggaagcatcttcaatatcaacagtatggcctggtatcgccaggctccagggaagcagcgcgaattggtcgcaagtagcaccaatggtggtagtacaaactatgcagactccgtgaagggccgattcaccatctccagagacaacgccaaacggaccgtgtatctgcaaatgaacagcctgcgccctgaggacacggccctgtattattgtaatgcactgctacaaccgtcgatttatgacattagtcgcacatattggggccaggggaccctggtcaccgtctcctca

SEQ ID NO: 289 - DNA, 363 bp, Artificial Sequence
  Nucleotide sequence of F010301640
gaggtgcaattggtggagtctgggggaggcgttgtgcagcctggggggtctctgagactctcctgtgcagcctctggaagcatcttcaatatcaacagtatggcctggtatcgccgggctccagggaagcagcgcgaattggtcgcaagtagcaccaatggtggtagtacaaactatgcagactccgtgaagggccgattcaccatctccagagacaacgccaaacggaccgtgtatctgcaaatgaacagcctgcgccctgaggacacggccctgtattattgtaatgcactgctacaaccgtcgatttatgacattagtcgcacatattggggccaggggaccctggtcaccgtctcctca

SEQ ID NO: 290 - DNA, 363 bp, Artificial Sequence
  Nucleotide sequence of F010301641
gaggtgcaattggtggagtctgggggaggcgttgtgcagcctggggggtctctgagactctcctgtgcagcctctggaagcatcttcaatatcaacagtatggcctggtatcgccgggctccagggaagcagcgcgaattggtcgcaagtagcaccaatggtggtagtacaaactatgcagactccgtgaagggccgattcaccatctccagagacaacgccaaaaacaccgtgtatctgcaaatgaacagcctgcgccctgaggacacggccctgtattattgtaatgcactgctacaaccgtcgatttatgacattagtcgcacatattggggccaggggaccctggtcaccgtctcctca

SEQ ID NO: 291 - DNA, 363 bp, Artificial Sequence
  Nucleotide sequence of F010301642
gaggtgcaattggtggagtctgggggaggcgttgtgcagcctggggggtctctgagactctcctgtgcagcctctggaagcatcttcaatatcaacagtatggcctggtatcgccaggctccagggaagcagcgcgaattggtcgcaagtagcaccaatggtggtagtacaaactatgcagactccgtgaagggccgattcaccatctccagagacaacgccaaaaacaccgtgtatctgcaaatgaacagcctgcgccctgaggacacggccctgtattattgtaatgcactgctacaaccgtcgatttatgacattagtcgcacatattggggccaggggaccctggtcaccgtctcctca

SEQ ID NO: 292 - DNA, 360 bp, Artificial Sequence
  Nucleotide sequence of F010301652
gaggtgcaattggtggagtctgggggaggcgttgtgcagcctggggggtctctgagactctcctgtgcagcctctggaagcatcttcaatatcaaccgcatggcctggtatcgccgggctccagggaagcagcgcgaattggtcgcatatagcaccaatggtggtgatacaaactatgcagactccgtgaagggccgattcaccatctccagagacaacgccaaaaacgtgtatctgcaaatgaacagcctgcgccctgaggacacggccctgtattattgtcgcgcactgctacaaccgtcgatttatgacattagtcgcacatattggggccaggggaccctggtcaccgtctcctca

SEQ ID NO: 293 - DNA, 360 bp, Artificial Sequence
  Nucleotide sequence of F010301653
gaggtgcaattggtggagtctgggggaggcgttgtgcagcctggggggtctctgagactctcctgtgcagcctctggaagcatcttcaatatcaaccgcatggcctggtatcgccgggctccagggaagcagcgcgaattggtcgcatatagcaccaatggtggtgatacaaactatgcagactccgtgaagggccgattcaccatctccagagacaacgccaaacgggtgtatctgcaaatgaacagcctgcgccctgaggacacggccctgtattattgtcgcgcactgctacaaccgtcgatttatgacattagtcgcacatattggggccaggggaccctggtcaccgtctcctca

SEQ ID NO: 294 - DNA, 360 bp, Artificial Sequence
  Nucleotide sequence of F010301654
gaggtgcaattggtggagtctgggggaggcgttgtgcagcctggggggtctctgagactctcctgtgcagcctctggaagcatcttcaatatcaaccgcatggcctggtatcgccaggctccagggaagcagcgcgaattggtcgcatatagcaccaatggtggtgatacaaactatgcagactccgtgaagggccgattcaccatctccagagacaacgccaaacgggtgtatctgcaaatgaacagcctgcgccctgaggacacggccctgtattattgtcgcgcactgctacaaccgtcgatttatgacattagtcgcacatattggggccaggggaccctggtcaccgtctcctca

SEQ ID NO: 295 - DNA, 360 bp, Artificial Sequence
  Nucleotide sequence of F010301655
gaggtgcaattggtggagtctgggggaggcgttgtgcagcctggggggtctctgagactctcctgtgcagcctctggaagcatcttcaatatcaaccgcatggcctggtatcgccaggctccagggaagcagcgcgaattggtcgcatatagcaccaatggtggtgatacaaactatgcagactccgtgaagggccgattcaccatctccagagacaacgccaaaaacgtgtatctgcaaatgaacagcctgcgccctgaggacacggccctgtattattgtcgcgcactgctacaaccgtcgatttatgacattagtcgcacatattggggccaggggaccctggtcaccgtctcctca

SEQ ID NO: 296 - DNA, 372 bp, Artificial Sequence
  Nucleotide sequence of F010301556
gaggtgcaattggtggagtctgggggaggcttggtgcaggctggggggtcactgagactctcctgtgctgcctctggaagaatcctccgtatcggctacatgaggtggcaccgccagggtgcagggaagcagcgcgagtttgtcgcgcgtattactggtggtagtgctacaggctatgcagactccgtgaagggccgattcaccatctccagagacaacgccaagaacacggtgtatctgcaaatgaacaacctgaatcctgaggacacggccgtctattattgtgaggcgttggtgactgcgagtgtacgtggtgggagtatacattctggaacctattggggccgggggaccctggtcaccgtctcctca

SEQ ID NO: 297 - DNA, 372 bp, Artificial Sequence
  Nucleotide sequence of F010301563
gaggtgcaattggtggagtctgggggaggcttggtgcaggctggggggtcactgagactctcctgtgctgcctctggaagaatcctccgtatcggctacatgaggtggcaccgccagggtgcagggaagcagcgcgagtttgtcgcgcgtattactgatgatagtgctacaggctatgcagactccgtgaagggccgattcaccatctccagagacaacgccaagaacacggtgtatctgcaaatgaacaacctgaatcctgaggacacggccgtctattattgtgaggcgttggtgactgcgagtgtacgtggtgggagtatacattctggaacctattggggccgggggaccctggtcaccgtctcctca

SEQ ID NO: 298 - DNA, 372 bp, Artificial Sequence
  Nucleotide sequence of F010301849
gaggtgcaattggtggagtctgggggaggcgtggtgcagcctggggggtcactgagactctcctgtgatgcctctggaaggatactccgtatcggctacatgaggtggcaccgccagggtgcagggaagcagcgcgagtttgtcgcgcgtattactgatgatagtgctacagactatgcagactccgtgaagggccgattcaccatctccagagacaacgccaagaacacggtgtatctgcaaatgaactccctgcgacctgaggacacggccctctattattgtgaggcgttggtgactgcgagtgtacgtggtgggagtatacattctggaacctattggggccaggggaccctggtcaccgtctcctca

SEQ ID NO: 299 - DNA, 372 bp, Artificial Sequence
  Nucleotide sequence of F010301850
gaggtgcaattggtggagtctgggggaggcgtcgtgcagccgggggggtcactgagactctcctgtgcggccagcggaaggattctccgtatcggctacatgaggtggtatcgccaggcgccggggaagcagcgcgagtttgtcgcgcgtattactgatgatagtgctacaggttatgcagactccgtgaagggccgattcaccatctccagagacaacgccaagaacacggtgtatctgcaaatgaacagcctgcgccctgaggacacggccctgtattattgtgaggcgttggtgactgcgagtgtacgtggtgggagtatacattctggcacctattggggccaggggaccctggtcaccgtctcctca

SEQ ID NO: 300 - DNA, 372 bp, Artificial Sequence
  Nucleotide sequence of F010301643
gaggtgcaattggtggagtctgggggaggcgtggtgcagcctggggggtcactgagactctcctgtgccgcctctggaaggatactccgtatcggctacatgaggtggcaccgccagggtgcagggaagcagcgcgagtttgtcgcgcgtattactgatgatagtgctacagactatgcagactccgtgaagggccgattcaccatctccagagacaacgccaagaacacggtgtatctgcaaatgaactccctgcgacctgaggacacggccctctattattgtgaggcgttggtgactgcgagtgtacgtggtgggagtatacattctggaacctattggggccaggggaccctggtcaccgtctcctca

SEQ ID NO: 301 - DNA, 372 bp, Artificial Sequence
  Nucleotide sequence of F010301644
gaggtgcaattggtggagtctgggggaggcgtggtgcagcctggggggtcactgagactctcctgtgatgcctctggaaggatactccgtatcggctacatgaggtggtatcgccagggtgcagggaagcagcgcgagtttgtcgcgcgtattactgatgatagtgctacagactatgcagactccgtgaagggccgattcaccatctccagagacaacgccaagaacacggtgtatctgcaaatgaactccctgcgacctgaggacacggccctctattattgtgaggcgttggtgactgcgagtgtacgtggtgggagtatacattctggaacctattggggccaggggaccctggtcaccgtctcctca

SEQ ID NO: 302 - DNA, 372 bp, Artificial Sequence
  Nucleotide sequence of F010301645
gaggtgcaattggtggagtctgggggaggcgtggtgcagcctggggggtcactgagactctcctgtgatgcctctggaaggatactccgtatcggctacatgaggtggcaccgccaggctgcagggaagcagcgcgagtttgtcgcgcgtattactgatgatagtgctacagactatgcagactccgtgaagggccgattcaccatctccagagacaacgccaagaacacggtgtatctgcaaatgaactccctgcgacctgaggacacggccctctattattgtgaggcgttggtgactgcgagtgtacgtggtgggagtatacattctggaacctattggggccaggggaccctggtcaccgtctcctca

SEQ ID NO: 303 - DNA, 372 bp, Artificial Sequence
  Nucleotide sequence of F010301646
gaggtgcaattggtggagtctgggggaggcgtggtgcagcctggggggtcactgagactctcctgtgatgcctctggaaggatactccgtatcggctacatgaggtggcaccgccagggtccagggaagcagcgcgagtttgtcgcgcgtattactgatgatagtgctacagactatgcagactccgtgaagggccgattcaccatctccagagacaacgccaagaacacggtgtatctgcaaatgaactccctgcgacctgaggacacggccctctattattgtgaggcgttggtgactgcgagtgtacgtggtgggagtatacattctggaacctattggggccaggggaccctggtcaccgtctcctca

SEQ ID NO: 304 - DNA, 372 bp, Artificial Sequence
  Nucleotide sequence of F010301647
gaggtgcaattggtggagtctgggggaggcgtggtgcagcctggggggtcactgagactctcctgtgatgcctctggaaggatactccgtatcggctacatgaggtggcaccgccagggtgcagggaagcagcgcgagcttgtcgcgcgtattactgatgatagtgctacagactatgcagactccgtgaagggccgattcaccatctccagagacaacgccaagaacacggtgtatctgcaaatgaactccctgcgacctgaggacacggccctctattattgtgaggcgttggtgactgcgagtgtacgtggtgggagtatacattctggaacctattggggccaggggaccctggtcaccgtctcctca

SEQ ID NO: 305 - DNA, 372 bp, Artificial Sequence
  Nucleotide sequence of F010301648
gaggtgcaattggtggagtctgggggaggcgtggtgcagcctggggggtcactgagactctcctgtgatgcctctggaaggatactccgtatcggctacatgaggtggcaccgccagggtgcagggaagcagcgcgagtttgtcgcgcgtattactgatgatagtgctacagactatgcagactccgtgaagggccgattcaccatctccagagacaacgccaagaacacggtgtatctgcaaatgaactccctgcgacctgaggacacggccctctattattgtaacgcgttggtgactgcgagtgtacgtggtgggagtatacattctggaacctattggggccaggggaccctggtcaccgtctcctca

SEQ ID NO: 306 - DNA, 372 bp, Artificial Sequence
  Nucleotide sequence of F010301649
gaggtgcaattggtggagtctgggggaggcgtcgtgcagccgggggggtcactgagactctcctgtgcggccagcggaaggattctccgtatcggctacatgaggtggcaccgccaggcgccggggaagcagcgcgagtttgtcgcgcgtattactgatgatagtgctacaggttatgcagactccgtgaagggccgattcaccatctccagagacaacgccaagaacacggtgtatctgcaaatgaacagcctgcgccctgaggacacggccctgtattattgtgaggcgttggtgactgcgagtgtacgtggtgggagtatacattctggcacctattggggccaggggaccctggtcaccgtctcctca

SEQ ID NO: 307 - DNA, 372 bp, Artificial Sequence
  Nucleotide sequence of F010302307
gaggtgcaattggtggagtctgggggaggcgtcgtgcagccgggggggtcactgagactctcctgtgcggccagcggaaggattctccgtatcggctacatgaggtggtatcgccaggcgccggggaagcagcgcgagtttgtcgcgcgtattactgatgatagtgctacaggttatgcagactccgtgaagggccgattcaccatctccagagacgcggccaagaacacggtgtatctgcaaatgaacagcctgcgccctgaggacacggccctgtattattgtgaggcgttggtgactgcgagtgtacgtggtgggagtatacattctggcacctattggggccaggggaccctggtcaccgtctcctca

SEQ ID NO: 308 - DNA, 372 bp, Artificial Sequence
  Nucleotide sequence of F010302308
gaggtgcaattggtggagtctgggggaggcgtcgtgcagccgggggggtcactgagactctcctgtgcggccagcggaaggattctccgtatcggctacatgaggtggtatcgccaggcgccggggaagcagcgcgagtttgtcgcgcgtattactgatgatagtgctacaggttatgcagactccgtgaagggccgattcaccatctccagagactatgccaagaacacggtgtatctgcaaatgaacagcctgcgccctgaggacacggccctgtattattgtgaggcgttggtgactgcgagtgtacgtggtgggagtatacattctggcacctattggggccaggggaccctggtcaccgtctcctca

SEQ ID NO: 309 - DNA, 372 bp, Artificial Sequence
  Nucleotide sequence of F010302309
gaggtgcaattggtggagtctgggggaggcgtcgtgcagccgggggggtcactgagactctcctgtgcggccagcggaaggattctccgtatcggctacatgaggtggtatcgccaggcgccggggaagcagcgcgagtttgtcgcgcgtattactgatgatagtgctacaggttatgcagactccgtgaagggccgattcaccatctccagagaccaggccaagaacacggtgtatctgcaaatgaacagcctgcgccctgaggacacggccctgtattattgtgaggcgttggtgactgcgagtgtacgtggtgggagtatacattctggcacctattggggccaggggaccctggtcaccgtctcctca

SEQ ID NO: 310 - DNA, 372 bp, Artificial Sequence
  Nucleotide sequence of F010302391
gaggtgcaattggtggagtctggtggtggagttgttcaacccggtggttctttgagattgtcttgcgccgcttccggtagaatcttgcgtatcggttacatgcgttggtatagacaagctcccggtaagcaaagagagttcgtcgccagaatcaccggaggttctgctactggttatgctgattccgtcaagggaagatttaccatctccagagacaacgctaagaacactgtttatttgcaaatgaactccttgagacccgaagataccgctttgtactactgcgaggctttggtcactgcttccgttagaggaggatctatccactccggtacttactggggtcaaggaaccctggtcaccgtctcctca

SEQ ID NO: 311 - DNA, 372 bp, Artificial Sequence
  Nucleotide sequence of F010302392
gaggtgcaattggtggagtctggtggtggtgttgttcagcccggtggttccttgagattgtcttgtgctgcttccggtagaatcttgagaatcggttacatgagatggtacagacaagcccccggtaagcagagagagttcgtcgccagaatcactggaggatctgctactggttacgctgactccgtcaagggaagattcaccatctccagagatcaagctaagaacaccgtctacttgcagatgaactccttgagaccagaggacaccgctttgtactactgtgaggctttagttactgcttccgttagaggtggttccattcactctggtacttactggggtcaaggaaccctggtcaccgtctcctca

SEQ ID NO: 312 - DNA, 372 bp, Artificial Sequence
  Nucleotide sequence of F010301868
gaggtgcaattggtggagtctgggggaggagtggtgcagcctggaggatcactaagactgtcctgtgcaacaaccagcagagctttcatcagggacgttttcacgggctggtatcgccgggttcccgggaaggagcgcgaattggtcgctcgcatttacaatggcggtaacacaaattatgcagacttcgcgaagggccgattcaccatctccagggacaacgccaagaagatggtgtatctgcaaatgaacagcctgcgccctgaggacacagcgctgtattactgccttttttcgggtacaatcaatactggcagagagtatcggtctggagactactggggccaggggaccctggtcaccgtctcctca

SEQ ID NO: 313 - DNA, 372 bp, Artificial Sequence
  Nucleotide sequence of F010301869
gaggtgcaattggtggagtctgggggaggagtggtgcagcctggaggatcactaagactgtcctgtgcaacaaccagcagagctttcatcagggacgttttcacgggctggtatcgccgggttcccgggaaggagcgcgaattggtcgctcgcatttacaatggcggtaacacaaattatgcagacttcgcgaagggccgattcaccatctccagggacaacgccaagaaaaccgtgtatctgcaaatgaacagcctgcgccctgaggacacagcgctgtattactgccttttttcgggtacaatcaatactggcagagagtatcggtctggagactactggggccaggggaccctggtcaccgtctcctca

SEQ ID NO: 314 - DNA, 372 bp, Artificial Sequence
  Nucleotide sequence of F010301870
gaggtgcaattggtggagtctgggggaggagtggtgcagcctggaggatcactaagactgtcctgtgcaacaaccagcagagctttcatcagggacgttttcacgggctggtatcgccgggttcccgggaaggagcgcgaattggtcgctcgcatttacaatggcggtaacacaaattatgcagacttcgcgaagggccgattcaccatctccagggacaacgccaagaagatggtgtatctgcaaatgaacagcctgcgccctgaggacacagcgctgtattactgcaacttttcgggtacaatcaatactggcagagagtatcggtctggagactactggggccaggggaccctggtcaccgtctcctca

SEQ ID NO: 315 - DNA, 372 bp, Artificial Sequence
  Nucleotide sequence of F010301871
gaggtgcaattggtggagtctgggggaggagtggtgcagcctggaggatcactaagactgtcctgtgcagcgaccagcagagctttcatcagggacgttttcacgggctggtatcgccgggttcccgggaaggagcgcgaattggtcgctcgcatttacaatggcggtaacacaaattatgcagacttcgcgaagggccgattcaccatctccagggacaacgccaagaagatggtgtatctgcaaatgaacagcctgcgccctgaggacacagcgctgtattactgccttttttcgggtacaatcaatactggcagagagtatcggtctggagactactggggccaggggaccctggtcaccgtctcctca

SEQ ID NO: 316 - DNA, 372 bp, Artificial Sequence
  Nucleotide sequence of F010301872
gaggtgcaattggtggagtctgggggaggagtggtgcagcctggaggatcactaagactgtcctgtgcaacaagcagcagagctttcatcagggacgttttcacgggctggtatcgccgggttcccgggaaggagcgcgaattggtcgctcgcatttacaatggcggtaacacaaattatgcagacttcgcgaagggccgattcaccatctccagggacaacgccaagaagatggtgtatctgcaaatgaacagcctgcgccctgaggacacagcgctgtattactgccttttttcgggtacaatcaatactggcagagagtatcggtctggagactactggggccaggggaccctggtcaccgtctcctca

SEQ ID NO: 317 - DNA, 372 bp, Artificial Sequence
  Nucleotide sequence of F010301873
gaggtgcaattggtggagtctgggggaggagtggtgcagcctggaggatcactaagactgtcctgtgcaacaaccagcagagctttcatcagggacgttttcacgggctggtatcgccaggttcccgggaaggagcgcgaattggtcgctcgcatttacaatggcggtaacacaaattatgcagacttcgcgaagggccgattcaccatctccagggacaacgccaagaagatggtgtatctgcaaatgaacagcctgcgccctgaggacacagcgctgtattactgccttttttcgggtacaatcaatactggcagagagtatcggtctggagactactggggccaggggaccctggtcaccgtctcctca

SEQ ID NO: 318 - DNA, 372 bp, Artificial Sequence
  Nucleotide sequence of F010301874
gaggtgcaattggtggagtctgggggaggagtggtgcagcctggaggatcactaagactgtcctgtgcaacaaccagcagagctttcatcagggacgttttcacgggctggtatcgccgggcgcccgggaaggagcgcgaattggtcgctcgcatttacaatggcggtaacacaaattatgcagacttcgcgaagggccgattcaccatctccagggacaacgccaagaagatggtgtatctgcaaatgaacagcctgcgccctgaggacacagcgctgtattactgccttttttcgggtacaatcaatactggcagagagtatcggtctggagactactggggccaggggaccctggtcaccgtctcctca

SEQ ID NO: 319 - DNA, 372 bp, Artificial Sequence
  Nucleotide sequence of F010301875
gaggtgcaattggtggagtctgggggaggagtggtgcagcctggaggatcactaagactgtcctgtgcaacaaccagcagagctttcatcagggacgttttcacgggctggtatcgccgggttcccgggaaggagcgcgaattggtcgctcgcatttacaatggcggtaacacaaattatgcagacagcgcgaagggccgattcaccatctccagggacaacgccaagaagatggtgtatctgcaaatgaacagcctgcgccctgaggacacagcgctgtattactgccttttttcgggtacaatcaatactggcagagagtatcggtctggagactactggggccaggggaccctggtcaccgtctcctca

SEQ ID NO: 320 - DNA, 372 bp, Artificial Sequence
  Nucleotide sequence of F010301876
gaggtgcaattggtggagtctgggggaggagtggtgcagcctggaggatcactaagactgtcctgtgcaacaaccagcagagctttcatcagggacgttttcacgggctggtatcgccgggttcccgggaaggagcgcgaattggtcgctcgcatttacaatggcggtaacacaaattatgcagacttcgtgaagggccgattcaccatctccagggacaacgccaagaagatggtgtatctgcaaatgaacagcctgcgccctgaggacacagcgctgtattactgccttttttcgggtacaatcaatactggcagagagtatcggtctggagactactggggccaggggaccctggtcaccgtctcctca

SEQ ID NO: 321 - DNA, 372 bp, Artificial Sequence
  Nucleotide sequence of F010301877
gaggtgcaattggtggagtctgggggaggagtggtgcagcctggaggatcactaagactgtcctgtgcaacaaccagcagagctttcatcagggacgttttcacgggctggtatcgccgggttcccgggaaggagcgcgaattggtcgctcgcatttacaatggcggtaacacaaattatgcagacttcgcgaagggccgattcaccatctccagggacaacgccaagaacatggtgtatctgcaaatgaacagcctgcgccctgaggacacagcgctgtattactgccttttttcgggtacaatcaatactggcagagagtatcggtctggagactactggggccaggggaccctggtcaccgtctcctca

SEQ ID NO: 322 - DNA, 372 bp, Artificial Sequence
  Nucleotide sequence of F010301892
gaggtgcaattggtggagtctgggggaggattggtgcagcctggaggatcactaagactgtcctgtgcaacaacctctagagctttcatcagggaccttttcacgggctggtatcgccgggttcccgggaaggagcgcgaattggtcgctcgcatttacaatggcggtaacacaaattatgcagacttcgcgaagggccgattctccatctccagggacaacgccaagaagatggtgactctgagaatgagcaatctgaaacctgaggacacaggggtctattactgccttttttcgggtacaatcaatactggcagagagtatcggtctggagactactggggccaggggaccctggtcaccgtctcctca

SEQ ID NO: 323 - DNA, 372 bp, Artificial Sequence
  Nucleotide sequence of F010301893
gaggtgcaattggtggagtctgggggaggagtggtgcagcctggaggatcactaagactgtcctgtgcaacaaccagcagagctttcatcagggacgttttcacgggctggtatcgccgggttcccgggaagcagcgcgaattggtcgctcgcatttacaatggcggtaacacaaattatgcagacttcgcgaagggccgattcaccatctccagggacaacgccaagaagatggtgtatctgcaaatgaacagcctgcgccctgaggacacagcgctgtattactgccttttttcgggtacaatcaatactggcagagagtatcggtctggagactactggggccaggggaccctggtcaccgtctcctca

SEQ ID NO: 324 - DNA, 372 bp, Artificial Sequence
  Nucleotide sequence of F010301932
gaggtgcaattggtggagtctgggggaggagttgtgcagcctggaggatcactaagactgtcctgtgcaacaacctccagagctttcatcagggacgttttcacgggctggtatcgccgggttcccgggaaggagcgcgaattggtcgctcgcatttacaatggcggtaacacaaattatgcagacttcgcgaagggccgattctccatctccagggacaacgccaagaagatggtgactctgagaatgagcaatctgcgccctgaggacacagggctgtattactgccttttttcgggtacaatcaatactggcagagagtatcggtctggagactactggggccaggggaccctggtcaccgtctcctca

SEQ ID NO: 325 - DNA, 372 bp, Artificial Sequence
  Nucleotide sequence of F010301933
gaggtgcaattggtggagtctgggggaggagttgtgcagcctggaggatcactaagactgtcctgtgcaacaacctccagagctttcatcagggacgttttcacgggctggtatcgccgggttcccgggaaggagcgcgaattggtcgctcgcatttacaatggcggtaacacaaattatgcagacttcgcgaagggccgattcaccatctccagggacaacgccaagaagatggtgactctgagaatgagcaatctgcgccctgaggacacagggctgtattactgccttttttcgggtacaatcaatactggcagagagtatcggtctggagactactggggccaggggaccctggtcaccgtctcctca

SEQ ID NO: 326 - DNA, 372 bp, Artificial Sequence
  Nucleotide sequence of F010301934
gaggtgcaattggtggagtctgggggaggagttgtgcagcctggaggatcactaagactgtcctgtgcaacaacctccagagctttcatcagggacgttttcacgggctggtatcgccgggttcccgggaaggagcgcgaattggtcgctcgcatttacaatggcggtaacacaaattatgcagacttcgcgaagggccgattctccatctccagggacaacgccaagaagaccgtgactctgagaatgagcaatctgcgccctgaggacacagggctgtattactgccttttttcgggtacaatcaatactggcagagagtatcggtctggagactactggggccaggggaccctggtcaccgtctcctca

SEQ ID NO: 327 - DNA, 372 bp, Artificial Sequence
  Nucleotide sequence of F010301935
gaggtgcaattggtggagtctgggggaggagttgtgcagcctggaggatcactaagactgtcctgtgcaacaacctccagagctttcatcagggacgttttcacgggctggtatcgccgggttcccgggaaggagcgcgaattggtcgctcgcatttacaatggcggtaacacaaattatgcagacttcgcgaagggccgattctccatctccagggacaacgccaagaagatggtgtatctgagaatgagcaatctgcgccctgaggacacagggctgtattactgccttttttcgggtacaatcaatactggcagagagtatcggtctggagactactggggccaggggaccctggtcaccgtctcctca

SEQ ID NO: 328 - DNA, 372 bp, Artificial Sequence
  Nucleotide sequence of F010301936
gaggtgcaattggtggagtctgggggaggagttgtgcagcctggaggatcactaagactgtcctgtgcaacaacctccagagctttcatcagggacgttttcacgggctggtatcgccgggttcccgggaaggagcgcgaattggtcgctcgcatttacaatggcggtaacacaaattatgcagacttcgcgaagggccgattctccatctccagggacaacgccaagaagatggtgactctgcaaatgagcaatctgcgccctgaggacacagggctgtattactgccttttttcgggtacaatcaatactggcagagagtatcggtctggagactactggggccaggggaccctggtcaccgtctcctca

SEQ ID NO: 329 - DNA, 372 bp, Artificial Sequence
  Nucleotide sequence of F010301937
gaggtgcaattggtggagtctgggggaggagttgtgcagcctggaggatcactaagactgtcctgtgcaacaacctccagagctttcatcagggacgttttcacgggctggtatcgccgggttcccgggaaggagcgcgaattggtcgctcgcatttacaatggcggtaacacaaattatgcagacttcgcgaagggccgattctccatctccagggacaacgccaagaagatggtgactctgagaatgaacaatctgcgccctgaggacacagggctgtattactgccttttttcgggtacaatcaatactggcagagagtatcggtctggagactactggggccaggggaccctggtcaccgtctcctca

SEQ ID NO: 330 - DNA, 372 bp, Artificial Sequence
  Nucleotide sequence of F010301938
gaggtgcaattggtggagtctgggggaggagttgtgcagcctggaggatcactaagactgtcctgtgcaacaacctccagagctttcatcagggacgttttcacgggctggtatcgccgggttcccgggaaggagcgcgaattggtcgctcgcatttacaatggcggtaacacaaattatgcagacttcgcgaagggccgattctccatctccagggacaacgccaagaagatggtgactctgagaatgagcagcctgcgccctgaggacacagggctgtattactgccttttttcgggtacaatcaatactggcagagagtatcggtctggagactactggggccaggggaccctggtcaccgtctcctca

SEQ ID NO: 331 - DNA, 372 bp, Artificial Sequence
  Nucleotide sequence of F010301939
gaggtgcaattggtggagtctgggggaggagttgtgcagcctggaggatcactaagactgtcctgtgcaacaacctccagagctttcatcagggacgttttcacgggctggtatcgccgggttcccgggaaggagcgcgaattggtcgctcgcatttacaatggcggtaacacaaattatgcagacttcgcgaagggccgattctccatctccagggacaacgccaagaagatggtgactctgagaatgagcaatctgcgccctgaggacacagcgctgtattactgccttttttcgggtacaatcaatactggcagagagtatcggtctggagactactggggccaggggaccctggtcaccgtctcctca

SEQ ID NO: 332 - DNA, 372 bp, Artificial Sequence
  Nucleotide sequence of F010302333
gaggtgcaattggtggagtctgggggaggagtggtgcagcctggaggatcactaagactgtcctgtgcagcgagcagcagacagttcatcagggacgttttcacgggctggtatcgccgggcgcccgggaagcagcgcgaattggtcgctcgcatttacaatgaaggtaacacaaattatgcagacagcgcgaagggccgattcaccatctccagggacaacgccaagaaaaccgtgtatctgcaaatgaacagcctgcgccctgaggacacagcgctgtattactgccttttttcgggtacaatcagcactggcagagagtatcggtctggagactactggggccaggggaccctggtcaccgtctcctca

SEQ ID NO: 333 - DNA, 372 bp, Artificial Sequence
  Nucleotide sequence of F010302334
gaggtgcaattggtggagtctgggggaggagtggtgcagcctggaggatcactaagactgtcctgtgcagcgagcagcagacagttcatcagggacgttttcacgggctggtatcgccgggcgcccgggaagcagcgcgaattggtcgctcgcatttacaatgaaggtaacacacagtatgcagacagcgcgaagggccgattcaccatctccagggacaacgccaagaaaaccgtgtatctgcaaatgaacagcctgcgccctgaggacacagcgctgtattactgccttttttcgggtacaatcagcactggcagagagtatcggtctggagactactggggccaggggaccctggtcaccgtctcctca

SEQ ID NO: 334 - DNA, 372 bp, Artificial Sequence
  Nucleotide sequence of F010302335
gaggtgcaattggtggagtctgggggaggagtggtgcagcctggaggatcactaagactgtcctgtgcagcgagcagcagacagttcatcagggacgttttcacgggctggtatcgccgggcgcccgggaagcagcgcgaattggtcgctcgcatttacgaaagcggtaacacacagtatgcagacagcgcgaagggccgattcaccatctccagggacaacgccaagaaaaccgtgtatctgcaaatgaacagcctgcgccctgaggacacagcgctgtattactgccttttttcgggtacaatcagcactggcagagagtatcggtctggagactactggggccaggggaccctggtcaccgtctcctca

SEQ ID NO: 335 - DNA, 372 bp, Artificial Sequence
  Nucleotide sequence of F010302336
gaggtgcaattggtggagtctgggggaggagtggtgcagcctggaggatcactaagactgtcctgtgcagcgagccatagacagttcatcagggacgttttcacgggctggtatcgccgggcgcccgggaagcagcgcgaattggtcgctcgcatttacaatgaaggtaacacacagtatgcagacagcgcgaagggccgattcaccatctccagggacaacgccaagaaaaccgtgtatctgcaaatgaacagcctgcgccctgaggacacagcgctgtattactgccttttttcgggtacaatcagcactggcagagagtatcggtctggagactactggggccaggggaccctggtcaccgtctcctca

SEQ ID NO: 336 - DNA, 372 bp, Artificial Sequence
  Nucleotide sequence of F010302337
gaggtgcaattggtggagtctgggggaggagtggtgcagcctggaggatcactaagactgtcctgtgcagcgagccatagacagttcatcagggacgttttcacgggctggtatcgccgggcgcccgggaagcagcgcgaattggtcgctcgcatttacgaaggcggtaacacacagtatgcagacagcgcgaagggccgattcaccatctccagggacaacgccaagaaaaccgtgtatctgcaaatgaacagcctgcgccctgaggacacagcgctgtattactgccttttttcgggtacaatcagcactggcagagagtatcggtctggagactactggggccaggggaccctggtcaccgtctcctca

SEQ ID NO: 337 - DNA, 372 bp, Artificial Sequence
  Nucleotide sequence of F010302338
gaggtgcaattggtggagtctgggggaggagtggtgcagcctggaggatcactaagactgtcctgtgcagcgagccatagagctttcatcagggacgttttcacgggctggtatcgccgggcgcccgggaagcagcgcgaattggtcgctcgcatttacgaaagcggtaacacacagtatgcagacagcgcgaagggccgattcaccatctccagggacaacgccaagaaaaccgtgtatctgcaaatgaacagcctgcgccctgaggacacagcgctgtattactgccttttttcgggtacaatcagcactggcagagagtatcggtctggagactactggggccaggggaccctggtcaccgtctcctca

SEQ ID NO: 338 - DNA, 372 bp, Artificial Sequence
  Nucleotide sequence of F010302339
gaggtgcaattggtggagtctgggggaggagtggtgcagcctggaggatcactaagactgtcctgtgcagcgagccatagagctttcatcagggacgttttcacgggctggtatcgccgggcgcccgggaagcagcgcgaattggtcgctcgcatttacgaaggcggtaacacacagtatgcagacagcgcgaagggccgattcaccatctccagggacaacgccaagaaaaccgtgtatctgcaaatgaacagcctgcgccctgaggacacagcgctgtattactgccttttttcgggtacaatcagcactggcagagagtatcggtctggagactactggggccaggggaccctggtcaccgtctcctca

SEQ ID NO: 339 - DNA, 372 bp, Artificial Sequence
  Nucleotide sequence of F010302340
gaggtgcaattggtggagtctgggggaggagtggtgcagcctggaggatcactaagactgtcctgtgcagcgagccatagagctttcatcagggacctgttcacgggctggtatcgccgggcgcccgggaagcagcgcgaattggtcgctcgcatttacgaaagcggtaacacaaattatgcagacagcgcgaagggccgattcaccatctccagggacaacgccaagaaaaccgtgtatctgcaaatgaacagcctgcgccctgaggacacagcgctgtattactgccttttttcgggtacaatcagcactggcagagagtatcggtctggagactactggggccaggggaccctggtcaccgtctcctca

SEQ ID NO: 340 - DNA, 372 bp, Artificial Sequence
  Nucleotide sequence of F010302341
gaggtgcaattggtggagtctgggggaggagtggtgcagcctggaggatcactaagactgtcctgtgcagcgagcagcagacagttcatcagggacgttttcacgggctggtatcgccaggcgcccgggaagcagcgcgaattggtcgctcgcatttacaatgaaggtaacacaaattatgcagacagcgcgaagggccgattcaccatctccagggacaacgccaagaaaaccgtgtatctgcaaatgaacagcctgcgccctgaggacacagcgctgtattactgccttttttcgggtacaatcagcactggcagagagtatcggtctggagactactggggccaggggaccctggtcaccgtctcctca

SEQ ID NO: 341 - DNA, 372 bp, Artificial Sequence
  Nucleotide sequence of F010302342
gaggtgcaattggtggagtctgggggaggagtggtgcagcctggaggatcactaagactgtcctgtgcagcgagcagcagacagttcatcagggacgttttcacgggctggtatcgccaggcgcccgggaagcagcgcgaattggtcgctcgcatttacaatgaaggtaacacacagtatgcagacagcgcgaagggccgattcaccatctccagggacaacgccaagaaaaccgtgtatctgcaaatgaacagcctgcgccctgaggacacagcgctgtattactgccttttttcgggtacaatcagcactggcagagagtatcggtctggagactactggggccaggggaccctggtcaccgtctcctca

SEQ ID NO: 342 - DNA, 372 bp, Artificial Sequence
  Nucleotide sequence of F010302343
gaggtgcaattggtggagtctgggggaggagtggtgcagcctggaggatcactaagactgtcctgtgcagcgagcagcagacagttcatcagggacgttttcacgggctggtatcgccaggcgcccgggaagcagcgcgaattggtcgctcgcatttacgaaagcggtaacacacagtatgcagacagcgcgaagggccgattcaccatctccagggacaacgccaagaaaaccgtgtatctgcaaatgaacagcctgcgccctgaggacacagcgctgtattactgccttttttcgggtacaatcagcactggcagagagtatcggtctggagactactggggccaggggaccctggtcaccgtctcctca

SEQ ID NO: 343 - DNA, 372 bp, Artificial Sequence
  Nucleotide sequence of F010302344
gaggtgcaattggtggagtctgggggaggagtggtgcagcctggaggatcactaagactgtcctgtgcagcgagccatagacagttcatcagggacgttttcacgggctggtatcgccaggcgcccgggaagcagcgcgaattggtcgctcgcatttacaatgaaggtaacacacagtatgcagacagcgcgaagggccgattcaccatctccagggacaacgccaagaaaaccgtgtatctgcaaatgaacagcctgcgccctgaggacacagcgctgtattactgccttttttcgggtacaatcagcactggcagagagtatcggtctggagactactggggccaggggaccctggtcaccgtctcctca

SEQ ID NO: 344 - DNA, 372 bp, Artificial Sequence
  Nucleotide sequence of F010302345
gaggtgcaattggtggagtctgggggaggagtggtgcagcctggaggatcactaagactgtcctgtgcagcgagccatagacagttcatcagggacgttttcacgggctggtatcgccaggcgcccgggaagcagcgcgaattggtcgctcgcatttacgaaggcggtaacacacagtatgcagacagcgcgaagggccgattcaccatctccagggacaacgccaagaaaaccgtgtatctgcaaatgaacagcctgcgccctgaggacacagcgctgtattactgccttttttcgggtacaatcagcactggcagagagtatcggtctggagactactggggccaggggaccctggtcaccgtctcctca

SEQ ID NO: 345 - DNA, 372 bp, Artificial Sequence
  Nucleotide sequence of F010302346
gaggtgcaattggtggagtctgggggaggagtggtgcagcctggaggatcactaagactgtcctgtgcagcgagccatagagctttcatcagggacgttttcacgggctggtatcgccaggcgcccgggaagcagcgcgaattggtcgctcgcatttacgaaagcggtaacacacagtatgcagacagcgcgaagggccgattcaccatctccagggacaacgccaagaaaaccgtgtatctgcaaatgaacagcctgcgccctgaggacacagcgctgtattactgccttttttcgggtacaatcagcactggcagagagtatcggtctggagactactggggccaggggaccctggtcaccgtctcctca

SEQ ID NO: 346 - DNA, 372 bp, Artificial Sequence
  Nucleotide sequence of F010302347
gaggtgcaattggtggagtctgggggaggagtggtgcagcctggaggatcactaagactgtcctgtgcagcgagccatagagctttcatcagggacgttttcacgggctggtatcgccaggcgcccgggaagcagcgcgaattggtcgctcgcatttacgaaggcggtaacacacagtatgcagacagcgcgaagggccgattcaccatctccagggacaacgccaagaaaaccgtgtatctgcaaatgaacagcctgcgccctgaggacacagcgctgtattactgccttttttcgggtacaatcagcactggcagagagtatcggtctggagactactggggccaggggaccctggtcaccgtctcctca

SEQ ID NO: 347 - DNA, 372 bp, Artificial Sequence
  Nucleotide sequence of F010302348
gaggtgcaattggtggagtctgggggaggagtggtgcagcctggaggatcactaagactgtcctgtgcagcgagccatagagctttcatcagggacctgttcacgggctggtatcgccaggcgcccgggaagcagcgcgaattggtcgctcgcatttacgaaagcggtaacacaaattatgcagacagcgcgaagggccgattcaccatctccagggacaacgccaagaaaaccgtgtatctgcaaatgaacagcctgcgccctgaggacacagcgctgtattactgccttttttcgggtacaatcagcactggcagagagtatcggtctggagactactggggccaggggaccctggtcaccgtctcctca

SEQ ID NO: 348 - DNA, 372 bp, Artificial Sequence
  Nucleotide sequence of F010302349
gaggtgcaattggtggagtctgggggaggagtggtgcagcctggaggatcactaagactgtcctgtgcagcgagcagcagacagttcatcagggacgttttcacgggctggtatcgccgggcgcccgggaagcagcgcgaattggtcgctcgcatttacaatgaaggtaacacaaattatgcagacagcgtgaagggccgattcaccatctccagggacaacgccaagaaaaccgtgtatctgcaaatgaacagcctgcgccctgaggacacagcgctgtattactgccttttttcgggtacaatcagcactggcagagagtatcggtctggagactactggggccaggggaccctggtcaccgtctcctca

SEQ ID NO: 349 - DNA, 372 bp, Artificial Sequence
  Nucleotide sequence of F010302350
gaggtgcaattggtggagtctgggggaggagtggtgcagcctggaggatcactaagactgtcctgtgcagcgagcagcagacagttcatcagggacgttttcacgggctggtatcgccgggcgcccgggaagcagcgcgaattggtcgctcgcatttacaatgaaggtaacacacagtatgcagacagcgtgaagggccgattcaccatctccagggacaacgccaagaaaaccgtgtatctgcaaatgaacagcctgcgccctgaggacacagcgctgtattactgccttttttcgggtacaatcagcactggcagagagtatcggtctggagactactggggccaggggaccctggtcaccgtctcctca

SEQ ID NO: 350 - DNA, 372 bp, Artificial Sequence
  Nucleotide sequence of F010302351
gaggtgcaattggtggagtctgggggaggagtggtgcagcctggaggatcactaagactgtcctgtgcagcgagcagcagacagttcatcagggacgttttcacgggctggtatcgccgggcgcccgggaagcagcgcgaattggtcgctcgcatttacgaaagcggtaacacacagtatgcagacagcgtgaagggccgattcaccatctccagggacaacgccaagaaaaccgtgtatctgcaaatgaacagcctgcgccctgaggacacagcgctgtattactgccttttttcgggtacaatcagcactggcagagagtatcggtctggagactactggggccaggggaccctggtcaccgtctcctca

SEQ ID NO: 351 - DNA, 372 bp, Artificial Sequence
  Nucleotide sequence of F010302352
gaggtgcaattggtggagtctgggggaggagtggtgcagcctggaggatcactaagactgtcctgtgcagcgagccatagacagttcatcagggacgttttcacgggctggtatcgccgggcgcccgggaagcagcgcgaattggtcgctcgcatttacaatgaaggtaacacacagtatgcagacagcgtgaagggccgattcaccatctccagggacaacgccaagaaaaccgtgtatctgcaaatgaacagcctgcgccctgaggacacagcgctgtattactgccttttttcgggtacaatcagcactggcagagagtatcggtctggagactactggggccaggggaccctggtcaccgtctcctca

SEQ ID NO: 352 - DNA, 372 bp, Artificial Sequence
  Nucleotide sequence of F010302353
gaggtgcaattggtggagtctgggggaggagtggtgcagcctggaggatcactaagactgtcctgtgcagcgagccatagacagttcatcagggacgttttcacgggctggtatcgccgggcgcccgggaagcagcgcgaattggtcgctcgcatttacgaaggcggtaacacacagtatgcagacagcgtgaagggccgattcaccatctccagggacaacgccaagaaaaccgtgtatctgcaaatgaacagcctgcgccctgaggacacagcgctgtattactgccttttttcgggtacaatcagcactggcagagagtatcggtctggagactactggggccaggggaccctggtcaccgtctcctca

SEQ ID NO: 353 - DNA, 372 bp, Artificial Sequence
  Nucleotide sequence of F010302354
gaggtgcaattggtggagtctgggggaggagtggtgcagcctggaggatcactaagactgtcctgtgcagcgagccatagagctttcatcagggacgttttcacgggctggtatcgccgggcgcccgggaagcagcgcgaattggtcgctcgcatttacgaaagcggtaacacacagtatgcagacagcgtgaagggccgattcaccatctccagggacaacgccaagaaaaccgtgtatctgcaaatgaacagcctgcgccctgaggacacagcgctgtattactgccttttttcgggtacaatcagcactggcagagagtatcggtctggagactactggggccaggggaccctggtcaccgtctcctca

SEQ ID NO: 354 - DNA, 372 bp, Artificial Sequence
  Nucleotide sequence of F010302355
gaggtgcaattggtggagtctgggggaggagtggtgcagcctggaggatcactaagactgtcctgtgcagcgagccatagagctttcatcagggacgttttcacgggctggtatcgccgggcgcccgggaagcagcgcgaattggtcgctcgcatttacgaaggcggtaacacacagtatgcagacagcgtgaagggccgattcaccatctccagggacaacgccaagaaaaccgtgtatctgcaaatgaacagcctgcgccctgaggacacagcgctgtattactgccttttttcgggtacaatcagcactggcagagagtatcggtctggagactactggggccaggggaccctggtcaccgtctcctca

SEQ ID NO: 355 - DNA, 372 bp, Artificial Sequence
  Nucleotide sequence of F010302356
gaggtgcaattggtggagtctgggggaggagtggtgcagcctggaggatcactaagactgtcctgtgcagcgagccatagagctttcatcagggacctgttcacgggctggtatcgccgggcgcccgggaagcagcgcgaattggtcgctcgcatttacgaaagcggtaacacaaattatgcagacagcgtgaagggccgattcaccatctccagggacaacgccaagaaaaccgtgtatctgcaaatgaacagcctgcgccctgaggacacagcgctgtattactgccttttttcgggtacaatcagcactggcagagagtatcggtctggagactactggggccaggggaccctggtcaccgtctcctca

SEQ ID NO: 356 - DNA, 372 bp, Artificial Sequence
  Nucleotide sequence of F010302357
gaggtgcaattggtggagtctgggggaggagtggtgcagcctggaggatcactaagactgtcctgtgcagcgagcagcagacagttcatcagggacgttttcacgggctggtatcgccaggcgcccgggaagcagcgcgaattggtcgctcgcatttacaatgaaggtaacacaaattatgcagacagcgtgaagggccgattcaccatctccagggacaacgccaagaaaaccgtgtatctgcaaatgaacagcctgcgccctgaggacacagcgctgtattactgccttttttcgggtacaatcagcactggcagagagtatcggtctggagactactggggccaggggaccctggtcaccgtctcctca

SEQ ID NO: 357 - DNA, 372 bp, Artificial Sequence
  Nucleotide sequence of F010302358
gaggtgcaattggtggagtctgggggaggagtggtgcagcctggaggatcactaagactgtcctgtgcagcgagcagcagacagttcatcagggacgttttcacgggctggtatcgccaggcgcccgggaagcagcgcgaattggtcgctcgcatttacaatgaaggtaacacacagtatgcagacagcgtgaagggccgattcaccatctccagggacaacgccaagaaaaccgtgtatctgcaaatgaacagcctgcgccctgaggacacagcgctgtattactgccttttttcgggtacaatcagcactggcagagagtatcggtctggagactactggggccaggggaccctggtcaccgtctcctca

SEQ ID NO: 358 - DNA, 372 bp, Artificial Sequence
  Nucleotide sequence of F010302359
gaggtgcaattggtggagtctgggggaggagtggtgcagcctggaggatcactaagactgtcctgtgcagcgagcagcagacagttcatcagggacgttttcacgggctggtatcgccaggcgcccgggaagcagcgcgaattggtcgctcgcatttacgaaagcggtaacacacagtatgcagacagcgtgaagggccgattcaccatctccagggacaacgccaagaaaaccgtgtatctgcaaatgaacagcctgcgccctgaggacacagcgctgtattactgccttttttcgggtacaatcagcactggcagagagtatcggtctggagactactggggccaggggaccctggtcaccgtctcctca

SEQ ID NO: 359 - DNA, 372 bp, Artificial Sequence
  Nucleotide sequence of F010302360
gaggtgcaattggtggagtctgggggaggagtggtgcagcctggaggatcactaagactgtcctgtgcagcgagccatagacagttcatcagggacgttttcacgggctggtatcgccaggcgcccgggaagcagcgcgaattggtcgctcgcatttacaatgaaggtaacacacagtatgcagacagcgtgaagggccgattcaccatctccagggacaacgccaagaaaaccgtgtatctgcaaatgaacagcctgcgccctgaggacacagcgctgtattactgccttttttcgggtacaatcagcactggcagagagtatcggtctggagactactggggccaggggaccctggtcaccgtctcctca

SEQ ID NO: 360 - DNA, 372 bp, Artificial Sequence
  Nucleotide sequence of F010302361
gaggtgcaattggtggagtctgggggaggagtggtgcagcctggaggatcactaagactgtcctgtgcagcgagccatagacagttcatcagggacgttttcacgggctggtatcgccaggcgcccgggaagcagcgcgaattggtcgctcgcatttacgaaggcggtaacacacagtatgcagacagcgtgaagggccgattcaccatctccagggacaacgccaagaaaaccgtgtatctgcaaatgaacagcctgcgccctgaggacacagcgctgtattactgccttttttcgggtacaatcagcactggcagagagtatcggtctggagactactggggccaggggaccctggtcaccgtctcctca

SEQ ID NO: 361 - DNA, 372 bp, Artificial Sequence
  Nucleotide sequence of F010302362
gaggtgcaattggtggagtctgggggaggagtggtgcagcctggaggatcactaagactgtcctgtgcagcgagccatagagctttcatcagggacgttttcacgggctggtatcgccaggcgcccgggaagcagcgcgaattggtcgctcgcatttacgaaagcggtaacacacagtatgcagacagcgtgaagggccgattcaccatctccagggacaacgccaagaaaaccgtgtatctgcaaatgaacagcctgcgccctgaggacacagcgctgtattactgccttttttcgggtacaatcagcactggcagagagtatcggtctggagactactggggccaggggaccctggtcaccgtctcctca

SEQ ID NO: 362 - DNA, 372 bp, Artificial Sequence
  Nucleotide sequence of F010302363
gaggtgcaattggtggagtctgggggaggagtggtgcagcctggaggatcactaagactgtcctgtgcagcgagccatagagctttcatcagggacgttttcacgggctggtatcgccaggcgcccgggaagcagcgcgaattggtcgctcgcatttacgaaggcggtaacacacagtatgcagacagcgtgaagggccgattcaccatctccagggacaacgccaagaaaaccgtgtatctgcaaatgaacagcctgcgccctgaggacacagcgctgtattactgccttttttcgggtacaatcagcactggcagagagtatcggtctggagactactggggccaggggaccctggtcaccgtctcctca

SEQ ID NO: 363 - DNA, 372 bp, Artificial Sequence
  Nucleotide sequence of F010302364
gaggtgcaattggtggagtctgggggaggagtggtgcagcctggaggatcactaagactgtcctgtgcagcgagccatagagctttcatcagggacctgttcacgggctggtatcgccaggcgcccgggaagcagcgcgaattggtcgctcgcatttacgaaagcggtaacacaaattatgcagacagcgtgaagggccgattcaccatctccagggacaacgccaagaaaaccgtgtatctgcaaatgaacagcctgcgccctgaggacacagcgctgtattactgccttttttcgggtacaatcagcactggcagagagtatcggtctggagactactggggccaggggaccctggtcaccgtctcctca

SEQ ID NO: 364 - DNA, 372 bp, Artificial Sequence
  Nucleotide sequence of F010302365
gaggtgcaattggtggagtctgggggaggagtggtgcagcctggaggatcactaagactgtcctgtgcagcgagcagcagagctttcatcagggacgttttcacgggctggtatcgccgggcgcccgggaagcagcgcgaattggtcgctcgcatttacaatggcggtaacacaaattatgcagacagcgcgaagggccgattcaccatctccagggacaacgccaagaaaaccgtgtatctgcaaatgaacagcctgcgccctgaggacacagcgctgtattactgccttttttcgggtacaatcagcactggcagagagtatcggtctggagactactggggccaggggaccctggtcaccgtctcctca

SEQ ID NO: 365 - DNA, 372 bp, Artificial Sequence
  Nucleotide sequence of F010302366
gaggtgcaattggtggagtctgggggaggagtggtgcagcctggaggatcactaagactgtcctgtgcagcgagcagcagagctttcatcagggacgttttcacgggctggtatcgccaggcgcccgggaagcagcgcgaattggtcgctcgcatttacaatggcggtaacacaaattatgcagacagcgcgaagggccgattcaccatctccagggacaacgccaagaaaaccgtgtatctgcaaatgaacagcctgcgccctgaggacacagcgctgtattactgccttttttcgggtacaatcagcactggcagagagtatcggtctggagactactggggccaggggaccctggtcaccgtctcctca

SEQ ID NO: 366 - DNA, 372 bp, Artificial Sequence
  Nucleotide sequence of F010302367
gaggtgcaattggtggagtctgggggaggagtggtgcagcctggaggatcactaagactgtcctgtgcagcgagcagcagagctttcatcagggacgttttcacgggctggtatcgccaggcgcccgggaagcagcgcgaattggtcgctcgcatttacaatggcggtaacacaaattatgcagacagcgtgaagggccgattcaccatctccagggacaacgccaagaaaaccgtgtatctgcaaatgaacagcctgcgccctgaggacacagcgctgtattactgccttttttcgggtacaatcagcactggcagagagtatcggtctggagactactggggccaggggaccctggtcaccgtctcctca

SEQ ID NO: 367 - DNA, 372 bp, Artificial Sequence; identical to SEQ ID NO: 332
  Nucleotide sequence of F010302368

SEQ ID NO: 368 - DNA, 360 bp, Artificial Sequence
  Nucleotide sequence of F010301656
gaggtgcaattggtggagtctgggggaggcttggcgcagcctggggggtctctgagactctcctgtgcagcctctggacccgtctttaatatcaaccgcatggcctggtatcgccgggctccagggaagcagcgcgaattggtcgcatatgtcacccctactggtgatataagttatactgactccgtgaagggccgattcaccatttctagggacggctccaagcggtggtctctacaaatgaacagcctgacacctgaggacacggccgtctattactgtcgcgctttactacaaccggatagttattctaatacgcgcacatattggggccaggggaccctggtcaccgtctcctca

SEQ ID NO: 369 - DNA, 363 bp, Artificial Sequence
  Nucleotide sequence of F010301840
gaggtgcaattggtggagtctgggggaggcgtggttcagcctggggggtctctgagactctcctgtgcagcctctggacccgtgttcaatatcaaccgcatggcctggtatcgccaggctccagggaagcagcgcgaattggtcgcatatgtcacccctactggtgatataagttatactgactccgtgaagggccgattcaccatttctcgcgacggctccaagcggacctggtctctacaaatgaacagcctgcgccctgaggacacggccctgtattactgtcgcgctttactacaaccggatagttattctaatacgcgcacatattggggccaggggaccctggtcaccgtctcctca

SEQ ID NO: 370 - DNA, 360 bp, Artificial Sequence
  Nucleotide sequence of F010301841
gaggtgcaattggtggagtctgggggaggcgtggttcagcctggggggtctctgagactctcctgtgcagcctctggacccgtgttcaatatcaaccgcatggcctggtatcgccaggctccagggaagcagcgcgaattggtcgcatatgtcacccctactggtgatataagttatactgactccgtgaagggccgattcaccatttctcgcgacggctccaagcggtggtctctacaaatgaacagcctgcgccctgaggacacggccctgtattactgtcgcgctttactacaaccggatagttattctaatacgcgcacatattggggccaggggaccctggtcaccgtctcctca

SEQ ID NO: 371 - DNA, 360 bp, Artificial Sequence
  Nucleotide sequence of F010301842
gaggtgcaattggtggagtctgggggaggcgtggttcagcctggggggtctctgagactctcctgtgcagcctctggacccgtgttcaatatcaaccgcatggcctggtatcgccaggctccagggaagcagcgcgaattggtcgcatatgtcacccctactggtgatataagttatgcggactccgtgaagggccgattcaccatttctcgcgacggctccaagcggtggtctctacaaatgaacagcctgcgccctgaggacacggccctgtattactgtcgcgctttactacaaccggatagttattctaatacgcgcacatattggggccaggggaccctggtcaccgtctcctca

SEQ ID NO: 372 - DNA, 360 bp, Artificial Sequence
  Nucleotide sequence of F010301843
gaggtgcaattggtggagtctgggggaggcgtggttcagcctggggggtctctgagactctcctgtgcagcctctggacccgtgttcaatatcaaccgcatggcctggtatcgccaggctccagggaagcagcgcgaattggtcgcatatgtcacccctactggtgatataagttatactgactccgtgaagggccgattcaccatttctcgcgacaactccaagcggtggtctctacaaatgaacagcctgcgccctgaggacacggccctgtattactgtcgcgctttactacaaccggatagttattctaatacgcgcacatattggggccaggggaccctggtcaccgtctcctca

SEQ ID NO: 373 - DNA, 360 bp, Artificial Sequence
  Nucleotide sequence of F010301844
gaggtgcaattggtggagtctgggggaggcgtggttcagcctggggggtctctgagactctcctgtgcagcctctggacccgtgttcaatatcaaccgcatggcctggtatcgccaggctccagggaagcagcgcgaattggtcgcatatgtcacccctactggtgatataagttatactgactccgtgaagggccgattcaccatttctcgcgacggctccaagaactggtctctacaaatgaacagcctgcgccctgaggacacggccctgtattactgtcgcgctttactacaaccggatagttattctaatacgcgcacatattggggccaggggaccctggtcaccgtctcctca

SEQ ID NO: 374 - DNA, 360 bp, Artificial Sequence
  Nucleotide sequence of F010301845
gaggtgcaattggtggagtctgggggaggcgtggttcagcctggggggtctctgagactctcctgtgcagcctctggacccgtgttcaatatcaaccgcatggcctggtatcgccaggctccagggaagcagcgcgaattggtcgcatatgtcacccctactggtgatataagttatactgactccgtgaagggccgattcaccatttctcgcgacggctccaagcgggtctctctacaaatgaacagcctgcgccctgaggacacggccctgtattactgtcgcgctttactacaaccggatagttattctaatacgcgcacatattggggccaggggaccctggtcaccgtctcctca

SEQ ID NO: 375 - DNA, 360 bp, Artificial Sequence
  Nucleotide sequence of F010301846
gaggtgcaattggtggagtctgggggaggcgtggttcagcctggggggtctctgagactctcctgtgcagcctctggacccgtgttcaatatcaaccgcatggcctggtatcgccaggctccagggaagcagcgcgaattggtcgcatatgtcacccctactggtgatataagttatactgactccgtgaagggccgattcaccatttctcgcgacggctccaagcggtggtatctacaaatgaacagcctgcgccctgaggacacggccctgtattactgtcgcgctttactacaaccggatagttattctaatacgcgcacatattggggccaggggaccctggtcaccgtctcctca

SEQ ID NO: 376 - DNA, 360 bp, Artificial Sequence
  Nucleotide sequence of F010301847
gaggtgcaattggtggagtctgggggaggcgtggttcagcctggggggtctctgagactctcctgtgcagcctctggacccgtgttcaatatcaaccgcatggcctggtatcgccaggctccagggaagcagcgcgaattggtcgcatatgtcacccctactggtgatataagttatgcggactccgtgaagggccgattcaccatttctcgcgacaactccaagaacgtgtatctacaaatgaacagcctgcgccctgaggacacggccctgtattactgtcgcgctttactacaaccggatagttattctaatacgcgcacatattggggccaggggaccctggtcaccgtctcctca

SEQ ID NO: 377 - DNA, 360 bp, Artificial Sequence
  Nucleotide sequence of F010301848
gaggtgcaattggtggagtctgggggaggcgtggttcagcctggggggtctctgagactctcctgtgcagcctctggacccgtgttcaatatcaaccgcatggcctggtatcgccaggctccagggaagcagcgcgaattggtcgcatatgtcacccctactggtgatataagttatgcggactccgtgaagggccgattcaccatttctcgcgacaactccaagcgggtgtatctacaaatgaacagcctgcgccctgaggacacggccctgtattactgtcgcgctttactacaaccggatagttattctaatacgcgcacatattggggccaggggaccctggtcaccgtctcctca

SEQ ID NO: 378 - DNA, 360 bp, Artificial Sequence
  Nucleotide sequence of F010301865
gaggtgcaattggtggagtctgggggaggcgtggttcagcctggggggtctctgagactctcctgtgcagcctctggacccgtgttcaatatcaaccgcatggcctggtatcgccaggctccagggaagcagcgcgaattggtcgcatatgtcacccctactggtgatataagttatgcggactccgtgaagggccgattcaccatttctcgcgacggctccaagcgggtgtatctacaaatgaacagcctgcgccctgaggacacggccctgtattactgtcgcgctttactacaaccggatagttattctaatacgcgcacatattggggccaggggaccctggtcaccgtctcctca

SEQ ID NO: 379 - DNA, 360 bp, Artificial Sequence
  Nucleotide sequence of F010301866
gaggtgcaattggtggagtctgggggaggcgtggttcagcctggggggtctctgagactctcctgtgcagcctctggacccgtgttcaatatcaaccgcatggcctggtatcgccaggctccagggaagcagcgcgaattggtcgcatatgtcacccctactggtgatataagttatgcggactccgtgaagggccgattcaccatttctcgcgacggctccaagaacgtgtatctacaaatgaacagcctgcgccctgaggacacggccctgtattactgtcgcgctttactacaaccggatagttattctaatacgcgcacatattggggccaggggaccctggtcaccgtctcctca

SEQ ID NO: 380 - DNA, 360 bp, Artificial Sequence
  Nucleotide sequence of F010302310
gaggtgcaattggtggagtctgggggaggcgtggttcagcctggggggtctctgagactctcctgtgcagcctctggacccgtgttcaatatcaaccgcatggcctggtatcgccaggctccagggaagcagcgcgaattggtcgcatatgtcacccctactggtgatataagttatgcggactccgtgaagggccgattcaccatttctcgcgacgcgtccaagcgggtgtatctacaaatgaacagcctgcgccctgaggacacggccctgtattactgtcgcgctttactacaaccgcgccgctattctaatacgcgcacatattggggccaggggaccctggtcaccgtctcctca

SEQ ID NO: 381 - DNA, 360 bp, Artificial Sequence
  Nucleotide sequence of F010302311
gaggtgcaattggtggagtctgggggaggcgtggttcagcctggggggtctctgagactctcctgtgcagcctctggacccgtgttcaatatcaaccgcatggcctggtatcgccaggctccagggaagcagcgcgaattggtcgcatatgtcacccctactggtgatataagttatgcggactccgtgaagggccgattcaccatttctcgcgaccgctccaagcgggtgtatctacaaatgaacagcctgcgccctgaggacacggccctgtattactgtcgcgctttactacaaccgcgccgctattctaatacgcgcacatattggggccaggggaccctggtcaccgtctcctca

SEQ ID NO: 382 - DNA, 360 bp, Artificial Sequence
  Nucleotide sequence of F010302312
gaggtgcaattggtggagtctgggggaggcgtggttcagcctggggggtctctgagactctcctgtgcagcctctggacccgtgttcaatatcaaccgcatggcctggtatcgccaggctccagggaagcagcgcgaattggtcgcatatgtcacccctactggtgatataagttatgcggactccgtgaagggccgattcaccatttctcgcgacggctccaagcgggtgtatctacaaatgaacagcctgcgccctgaggacacggccctgtattactgtcgcgctttactacaaccggatagttattctattacgcgcacatattggggccaggggaccctggtcaccgtctcctca

SEQ ID NO: 383 - DNA, 360 bp, Artificial Sequence
  Nucleotide sequence of F010302313
gaggtgcaattggtggagtctgggggaggcgtggttcagcctggggggtctctgagactctcctgtgcagcctctggacccgtgttcaatatcaaccgcatggcctggtatcgccaggctccagggaagcagcgcgaattggtcgcatatgtcacccctactggtgatataagttatgcggactccgtgaagggccgattcaccatttctcgcgacgcgtccaagcgggtgtatctacaaatgaacagcctgcgccccgaggacacggccctgtattactgtcgcgctttactacaaccggatagttattctattacgcgcacatattggggccaggggaccctggtcaccgtctcctca

SEQ ID NO: 384 - DNA, 360 bp, Artificial Sequence
  Nucleotide sequence of F010302314
gaggtgcaattggtggagtctgggggaggcgtggttcagcctggggggtctctgagactctcctgtgcagcctctggacccgtgttcaatatcaaccgcatggcctggtatcgccaggctccagggaagcagcgcgaattggtcgcatatgtcacccctactggtgatataagttatgcggactccgtgaagggccgattcaccatttctcgcgaccgctccaagcgggtgtatctacaaatgaacagcctgcgccctgaggacacggccctgtattactgtcgcgctttactacaaccggatagttattctattacgcgcacatattggggccaggggaccctggtcaccgtctcctca

SEQ ID NO: 385 - DNA, 360 bp, Artificial Sequence
  Nucleotide sequence of F010302315
gaggtgcaattggtggagtctgggggaggcgtggttcagcctggggggtctctgagactctcctgtgcagcctctggacccgtgttcaatatcaaccgcatggcctggtatcgccaggctccagggaagcagcgcgaattggtcgcatatgtcacccctactggtgatataagttatgcggactccgtgaagggccgattcaccatttctcgcgacggctccaagcgggtgtatctacaaatgaacagcctgcgccctgaggacacggccctgtattactgtcgcgctttactacaaccgcgcagttattctattacgcgcacatattggggccaggggaccctggtcaccgtctcctca

SEQ ID NO: 386 - DNA, 360 bp, Artificial Sequence
  Nucleotide sequence of F010302316
gaggtgcaattggtggagtctgggggaggcgtggttcagcctggggggtctctgagactctcctgtgcagcctctggacccgtgttcaatatcaaccgcatggcctggtatcgccaggctccagggaagcagcgcgaattggtcgcatatgtcacccctactggtgatataagttatgcggactccgtgaagggccgattcaccatttctcgcgacgcgtccaagcgggtgtatctacaaatgaacagcctgcgccctgaggacacggccctgtattactgtcgcgctttactacaaccgcgcagttattctattacgcgcacatattggggccaggggaccctggtcaccgtctcctca

SEQ ID NO: 387 - DNA, 360 bp, Artificial Sequence
  Nucleotide sequence of F010302317
gaggtgcaattggtggagtctgggggaggcgtggttcagcctggggggtctctgagactctcctgtgcagcctctggacccgtgttcaatatcaaccgcatggcctggtatcgccaggctccagggaagcagcgcgaattggtcgcatatgtcacccctactggtgatataagttatgcggactccgtgaagggccgattcaccatttctcgcgaccgctccaagcgggtgtatctacaaatgaacagcctgcgccctgaggacacggccctgtattactgtcgcgctttactacaaccgcgcagttattctattacgcgcacatattggggccaggggaccctggtcaccgtctcctca

SEQ ID NO: 388 - DNA, 360 bp, Artificial Sequence
  Nucleotide sequence of F010302318
gaggtgcaattggtggagtctgggggaggcgtggttcagcctggggggtctctgagactctcctgtgcagcctctggacccgtgttcaatatcaaccgcatggcctggtatcgccaggctccagggaagcagcgcgaattggtcgcatatgtcacccctactggtgatataagttatgcggactccgtgaagggccgattcaccatttctcgcgacggctccaagcgggtgtatctacaaatgaacagcctgcgccctgaggacacggccctgtattactgtcgcgctttactacaaccggatcgctattctattacgcgcacatattggggccaggggaccctggtcaccgtctcctca

SEQ ID NO: 389 - DNA, 360 bp, Artificial Sequence
  Nucleotide sequence of F010302319
gaggtgcaattggtggagtctgggggaggcgtggttcagcctggggggtctctgagactctcctgtgcagcctctggacccgtgttcaatatcaaccgcatggcctggtatcgccaggctccagggaagcagcgcgaattggtcgcatatgtcacccctactggtgatataagttatgcggactccgtgaagggccgattcaccatttctcgcgacgcgtccaagcgggtgtatctacaaatgaacagcctgcgccctgaggacacggccctgtattactgtcgcgctttactacaaccggatcgctattctattacgcgcacatattggggccaggggaccctggtcaccgtctcctca

SEQ ID NO: 390 - DNA, 360 bp, Artificial Sequence
  Nucleotide sequence of F010302320
gaggtgcaattggtggagtctgggggaggcgtggttcagcctggggggtctctgagactctcctgtgcagcctctggacccgtgttcaatatcaaccgcatggcctggtatcgccaggctccagggaagcagcgcgaattggtcgcatatgtcacccctactggtgatataagttatgcggactccgtgaagggccgattcaccatttctcgcgacgcgtccaagcgggtgtatctacaaatgaacagcctgcgccctgaggacacggccctgtattactgtcgcgctttactacaaccggatagttattctaatacgcgcacatattggggccaggggaccctggtcaccgtctcctca

SEQ ID NO: 391 - DNA, 360 bp, Artificial Sequence
  Nucleotide sequence of F010302321
gaggtgcaattggtggagtctgggggaggcgtggttcagcctggggggtctctgagactctcctgtgcagcctctggacccgtgttcaatatcaaccgcatggcctggtatcgccaggctccagggaagcagcgcgaattggtcgcatatgtcacccctactggtgatataagttatgcggactccgtgaagggccgattcaccatttctcgcgaccgctccaagcgggtgtatctacaaatgaacagcctgcgccctgaggacacggccctgtattactgtcgcgctttactacaaccggatcgctattctattacgcgcacatattggggccaggggaccctggtcaccgtctcctca

SEQ ID NO: 392 - DNA, 360 bp, Artificial Sequence
  Nucleotide sequence of F010302322
gaggtgcaattggtggagtctgggggaggcgtggttcagcctggggggtctctgagactctcctgtgcagcctctggacccgtgttcaatatcaaccgcatggcctggtatcgccaggctccagggaagcagcgcgaattggtcgcatatgtcacccctactggtgatataagttatgcggactccgtgaagggccgattcaccatttctcgcgacggctccaagcgggtgtatctacaaatgaacagcctgcgccctgaggacacggccctgtattactgtcgcgctttactacaaccgcgccgctattctattacgcgcacatattggggccaggggaccctggtcaccgtctcctca

SEQ ID NO: 393 - DNA, 360 bp, Artificial Sequence
  Nucleotide sequence of F010302323
gaggtgcaattggtggagtctgggggaggcgtggttcagcctggggggtctctgagactctcctgtgcagcctctggacccgtgttcaatatcaaccgcatggcctggtatcgccaggctccagggaagcagcgcgaattggtcgcatatgtcacccctactggtgatataagttatgcggactccgtgaagggccgattcaccatttctcgcgacgcgtccaagcgggtgtatctacaaatgaacagcctgcgccctgaggacacggccctgtattactgtcgcgctttactacaaccgcgccgctattctattacgcgcacatattggggccaggggaccctggtcaccgtctcctca

SEQ ID NO: 394 - DNA, 360 bp, Artificial Sequence
  Nucleotide sequence of F010302324
gaggtgcaattggtggagtctgggggaggcgtggttcagcctggggggtctctgagactctcctgtgcagcctctggacccgtgttcaatatcaaccgcatggcctggtatcgccaggctccagggaagcagcgcgaattggtcgcatatgtcacccctactggtgatataagttatgcggactccgtgaagggccgattcaccatttctcgcgaccgctccaagcgggtgtatctacaaatgaacagcctgcgccctgaggacacggccctgtattactgtcgcgctttactacaaccgcgccgctattctattacgcgcacatattggggccaggggaccctggtcaccgtctcctca

SEQ ID NO: 395 - DNA, 360 bp, Artificial Sequence
  Nucleotide sequence of F010302325
gaggtgcaattggtggagtctgggggaggcgtggttcagcctggggggtctctgagactctcctgtgcagcctctggacccgtgttcaatatcaaccgcatggcctggtatcgccaggctccagggaagcagcgcgaattggtcgcatatgtcacccctactggtgatataagttatgcggactccgtgaagggccgattcaccatttctcgcgaccgctccaagcgggtgtatctacaaatgaacagcctgcgccctgaggacacggccctgtattactgtcgcgctttactacaaccggatagttattctaatacgcgcacatattggggccaggggaccctggtcaccgtctcctca

SEQ ID NO: 396 - DNA, 360 bp, Artificial Sequence
  Nucleotide sequence of F010302326
gaggtgcaattggtggagtctgggggaggcgtggttcagcctggggggtctctgagactctcctgtgcagcctctggacccgtgttcaatatcaaccgcatggcctggtatcgccaggctccagggaagcagcgcgaattggtcgcatatgtcacccctactggtgatataagttatgcggactccgtgaagggccgattcaccatttctcgcgacggctccaagcgggtgtatctacaaatgaacagcctgcgccctgaggacacggccctgtattactgtcgcgctttactacaaccgcgcagttattctaatacgcgcacatattggggccaggggaccctggtcaccgtctcctca

SEQ ID NO: 397 - DNA, 360 bp, Artificial Sequence
  Nucleotide sequence of F010302327
gaggtgcaattggtggagtctgggggaggcgtggttcagcctggggggtctctgagactctcctgtgcagcctctggacccgtgttcaatatcaaccgcatggcctggtatcgccaggctccagggaagcagcgcgaattggtcgcatatgtcacccctactggtgatataagttatgcggactccgtgaagggccgattcaccatttctcgcgacgcgtccaagcgggtgtatctacaaatgaacagcctgcgccctgaggacacggccctgtattactgtcgcgctttactacaaccgcgcagttattctaatacgcgcacatattggggccaggggaccctggtcaccgtctcctca

SEQ ID NO: 398 - DNA, 360 bp, Artificial Sequence
  Nucleotide sequence of F010302328
gaggtgcaattggtggagtctgggggaggcgtggttcagcctggggggtctctgagactctcctgtgcagcctctggacccgtgttcaatatcaaccgcatggcctggtatcgccaggctccagggaagcagcgcgaattggtcgcatatgtcacccctactggtgatataagttatgcggactccgtgaagggccgattcaccatttctcgcgaccgctccaagcgggtgtatctacaaatgaacagcctgcgccctgaggacacggccctgtattactgtcgcgctttactacaaccgcgcagttattctaatacgcgcacatattggggccaggggaccctggtcaccgtctcctca

SEQ ID NO: 399 - DNA, 360 bp, Artificial Sequence
  Nucleotide sequence of F010302329
gaggtgcaattggtggagtctgggggaggcgtggttcagcctggggggtctctgagactctcctgtgcagcctctggacccgtgttcaatatcaaccgcatggcctggtatcgccaggctccagggaagcagcgcgaattggtcgcatatgtcacccctactggtgatataagttatgcggactccgtgaagggccgattcaccatttctcgcgacggctccaagcgggtgtatctacaaatgaacagcctgcgccctgaggacacggccctgtattactgtcgcgctttactacaaccggatcgctattctaatacgcgcacatattggggccaggggaccctggtcaccgtctcctca

SEQ ID NO: 400 - DNA, 360 bp, Artificial Sequence
  Nucleotide sequence of F010302330
gaggtgcaattggtggagtctgggggaggcgtggttcagcctggggggtctctgagactctcctgtgcagcctctggacccgtgttcaatatcaaccgcatggcctggtatcgccaggctccagggaagcagcgcgaattggtcgcatatgtcacccctactggtgatataagttatgcggactccgtgaagggccgattcaccatttctcgcgacgcgtccaagcgggtgtatctacaaatgaacagcctgcgccctgaggacacggccctgtattactgtcgcgctttactacaaccggatcgctattctaatacgcgcacatattggggccaggggaccctggtcaccgtctcctca

SEQ ID NO: 401 - DNA, 360 bp, Artificial Sequence
  Nucleotide sequence of F010302331
gaggtgcaattggtggagtctgggggaggcgtggttcagcctggggggtctctgagactctcctgtgcagcctctggacccgtgttcaatatcaaccgcatggcctggtatcgccaggctccagggaagcagcgcgaattggtcgcatatgtcacccctactggtgatataagttatgcggactccgtgaagggccgattcaccatttctcgcgaccgctccaagcgggtgtatctacaaatgaacagcctgcgccctgaggacacggccctgtattactgtcgcgctttactacaaccggatcgctattctaatacgcgcacatattggggccaggggaccctggtcaccgtctcctca

SEQ ID NO: 402 - DNA, 360 bp, Artificial Sequence
  Nucleotide sequence of F010302332
gaggtgcaattggtggagtctgggggaggcgtggttcagcctggggggtctctgagactctcctgtgcagcctctggacccgtgttcaatatcaaccgcatggcctggtatcgccaggctccagggaagcagcgcgaattggtcgcatatgtcacccctactggtgatataagttatgcggactccgtgaagggccgattcaccatttctcgcgacggctccaagcgggtgtatctacaaatgaacagcctgcgccctgaggacacggccctgtattactgtcgcgctttactacaaccgcgccgctattctaatacgcgcacatattggggccaggggaccctggtcaccgtctcctca

SEQ ID NO: 403 - DNA, 360 bp, Artificial Sequence
  Nucleotide sequence of F010302370
gaggtgcaattggtggagtctgggggaggcgtggttcagcctggggggtctctgagactctcctgtgcagcctctggacccgtgttcaatatcaaccgcatggcctggtatcgccaggctccagggaagcagcgcgaattggtcgcatatgtcacccctactggtgatataagttatgcggactccgtgaagggccgattcaccatttctcgcgaccgctccaagcgggtgtatctacaaatgaacagcctgcgccctgaggacacggccctgtattactgtcgcgctttactacaaccgagcagttattctattacgcgcacatattggggccaggggaccctggtcaccgtctcctca

SEQ ID NO: 404 - DNA, 360 bp, Artificial Sequence
  Nucleotide sequence of F010302371
gaggtgcaattggtggagtctgggggaggcgtggttcagcctggggggtctctgagactctcctgtgcagcctctggacccgtgttcaatatcaaccgcatggcctggtatcgccaggctccagggaagcagcgcgaattggtcgcatatgtcacccctactggtgatataagttatgcggactccgtgaagggccgattcaccatttctcgcgaccgctccaagcgggtgtatctacaaatgaacagcctgcgccctgaggacacggccctgtattactgtcgcgctttactacaaccgaacgtgtattctattacgcgcacatattggggccaggggaccctggtcaccgtctcctca

SEQ ID NO: 405 - DNA, 360 bp, Artificial Sequence
  Nucleotide sequence of F010302372
gaggtgcaattggtggagtctgggggaggcgtggttcagcctggggggtctctgagactctcctgtgcagcctctggacccgtgttcaatatcaaccgcatggcctggtatcgccaggctccagggaagcagcgcgaattggtcgcatatgtcacccctactggtgatataagttatgcggactccgtgaagggccgattcaccatttctcgcgaccgctccaagcgggtgtatctacaaatgaacagcctgcgccctgaggacacggccctgtattactgtcgcgctttactacaaccggatgtgtattctattacgcgcacatattggggccaggggaccctggtcaccgtctcctca

SEQ ID NO: 406 - DNA, 360 bp, Artificial Sequence
  Nucleotide sequence of F010302383
gaggtgcaattggtggagtctgggggaggcgtggttcagcctggggggtctctgagactctcctgtgcagcctctggacccgtgttcaatatcaaccgcatggcctggtatcgccaggctccagggaagcagcgcgaattggtcgcatatgtcacccctactggtgatataagttatgcggactccgtgaagggccgattcaccatttctcgcggtggctccaagcgggtgtatctacaaatgaacagcctgcgccctgaggacacggccctgtattactgtcgcgctttactacaaccgagcagttattctggcacgcgcacatattggggccaggggaccctggtcaccgtctcctca

SEQ ID NO: 407 - DNA, 360 bp, Artificial Sequence
  Nucleotide sequence of F010302384
gaggtgcaattggtggagtctgggggaggcgtggttcagcctggggggtctctgagactctcctgtgcagcctctggacccgtgttcaatatcaaccgcatggcctggtatcgccaggctccagggaagcagcgcgaattggtcgcatatgtcacccctactggtgatataagttatgcggactccgtgaagggccgattcaccatttctcgcggtggctccaagcgggtgtatctacaaatgaacagcctgcgccctgaggacacggccctgtattactgtcgcgctttactacaaccgagcagttattctattacgcgcacatattggggccaggggaccctggtcaccgtctcctca

SEQ ID NO: 408 - DNA, 360 bp, Artificial Sequence
  Nucleotide sequence of F010302385
gaggtgcaattggtggagtctgggggaggcgtggttcagcctggggggtctctgagactctcctgtgcagcctctggacccgtgttcaatatcaaccgcatggcctggtatcgccaggctccagggaagcagcgcgaattggtcgcatatgtcacccctactggtgatataagttatgcggactccgtgaagggccgattcaccatttctcgccagggctccaagcgggtgtatctacaaatgaacagcctgcgccctgaggacacggccctgtattactgtcgcgctttactacaaccgagcagttattctggcacgcgcacatattggggccaggggaccctggtcaccgtctcctca

SEQ ID NO: 409 - DNA, 360 bp, Artificial Sequence
  Nucleotide sequence of F010302386
gaggtgcaattggtggagtctgggggaggcgtggttcagcctggggggtctctgagactctcctgtgcagcctctggacccgtgttcaatatcaaccgcatggcctggtatcgccaggctccagggaagcagcgcgaattggtcgcatatgtcacccctactggtgatataagttatgcggactccgtgaagggccgattcaccatttctcgccagggctccaagcgggtgtatctacaaatgaacagcctgcgccctgaggacacggccctgtattactgtcgcgctttactacaaccgagcagttattctattacgcgcacatattggggccaggggaccctggtcaccgtctcctca

SEQ ID NO: 410 - protein, 123 aa, Artificial Sequence
  F0103240B04 (No tag)
EVQLVESGGGLVQAGGSLRLSCAASGGTGRRYAMGWFRQAPGKEREIVAAIRWSAMTYYADDGKGRFTISRDNAKNTVYLQMNSLKPEDTAIYYCAYTWDYFKYDQVRAYRGWGQGTLVTVSS

SEQ ID NO: 411 - protein, 127 aa, Artificial Sequence
  F0103478E09 (No tag)
EVQLVESGGGLVQAGGSLRLSCAASGRAFSTLAMGWFRQAPGKEREFVAAISRNGNNSATGDSLKGRFTISRDSTKSTVFLQMNTLKPEDTAVYYCAAISTPSASHPYVRKESYRYWGQGTLVTVSS

SEQ ID NO: 412 - protein, 113 aa, Artificial Sequence
  F0103492E09 (No tag)
EVQLVESGGGLVQAGGSLRLSCAASKSILSFAYMRWYRQAPGKQREFVASIAIGGATSYTDSVKGRFTISRDNAKNTVYLQMNSLKPEDTAVYYCSAPAGQYRGQGTLVTVSS

SEQ ID NO: 413 - protein, 123 aa, Artificial Sequence
  F0103500E03 (No tag)
EVQLVESGGGLVQPGGSLRLSCAASGRTFSRYQMGWFRQAPGKEREFVAYISWSGSTRYVDSVKGRFTISRDNAKNTVYLQMNSLKPEDTAVYHCAAGTAGIISSRPETYDSWGQGTLVTVSS

SEQ ID NO: 414 - protein, 116 aa, Artificial Sequence
  F0103505D08 (No tag)
EVQLVESGGGLVQAGGSLRLSCVTSGRTSDLSTMNWFRQAPGKEREFVARITRRGSTYYAESVKERFIISRDNAKNTVYLQMNSLKPEDTANYYCTAASEMGYHYRGQGTLVTVSS

SEQ ID NO: 415 - protein, 126 aa, Artificial Sequence
  F0103495F09 (No tag)
EVQLVESGGGLVQAGSSLSLSCAASGRALSTYAMGWFRQAPGKEREFVARISRSGITTYYTDSVKGRFTISRDRAKDTVYLQMNSLKPEDTAIYLCAADASTNPAGYYLRNRYDYWGQGTLVTVSS

SEQ ID NO: 416 - protein, 11 aa, Artificial Sequence
  F0103240B04-CDR1
GGTGRRYAMGW

SEQ ID NO: 417 - protein, 9 aa, Artificial Sequence
  F0103240B04-CDR2
AIRWSAMTY

SEQ ID NO: 418 - protein, 15 aa, Artificial Sequence
  F0103240B04-CDR3
TWDYFKYDQVRAYRG

SEQ ID NO: 419 - protein, 10 aa, Artificial Sequence
  F0103478E09-CDR1
GRAFSTLAMG

SEQ ID NO: 420 - protein, 8 aa, Artificial Sequence
  F0103478E09-CDR2
ISRNGNNS

SEQ ID NO: 421 - protein, 18 aa, Artificial Sequence
  F0103478E09-CDR3
ISTPSASHPYVRKESYRY

SEQ ID NO: 422 - protein, 10 aa, Artificial Sequence
  F0103492E09-CDR1
KSILSFAYMR

SEQ ID NO: 423 - protein, 9 aa, Artificial Sequence
  F0103492E09-CDR2
SIAIGGATS

SEQ ID NO: 424 - protein, 6 aa, Artificial Sequence
  F0103492E09-CDR3
PAGQYR

SEQ ID NO: 425 - protein, 10 aa, Artificial Sequence
  F0103500E03-CDR1
GRTFSRYQMG

SEQ ID NO: 426 - protein, 9 aa, Artificial Sequence
  F0103500E03-CDR2
YISWSGSTR

SEQ ID NO: 427 - protein, 15 aa, Artificial Sequence
  F0103500E03-CDR3
GTAGIISSRPETYDS

SEQ ID NO: 428 - protein, 10 aa, Artificial Sequence
  F0103505D08-CDR1
GRTSDLSTMN

SEQ ID NO: 429 - protein, 9 aa, Artificial Sequence
  F0103505D08-CDR2
RITRRGSTY

SEQ ID NO: 430 - protein, 9 aa, Artificial Sequence
  F0103505D08-CDR3
ASEMGYHYR

SEQ ID NO: 431 - protein, 10 aa, Artificial Sequence
  F0103495F09-CDR1
GRALSTYAMG

SEQ ID NO: 432 - protein, 9 aa, Artificial Sequence
  F0103495F09-CDR2
RISRSGITT

SEQ ID NO: 433 - protein, 17 aa, Artificial Sequence
  F0103495F09-CDR3
DASTNPAGYYLRNRYDY

SEQ ID NO: 434 - protein, 120 aa, Artificial Sequence
  F103275B05(N93R)
EVQLVESGGGLVQPGGSLRLSCAASGSIFNINSMAWYRRAPGKQRELVASSTNGGSTNYADSVKGRFTISRDNAKRVYLQMNSLTPEDTAVYYCRALLQPSIYDISRTYWGQGTLVTVSS

SEQ ID NO: 435 - protein, 120 aa, Artificial Sequence
  F0103275B05 (E1D,N93R)
DVQLVESGGGLVQPGGSLRLSCAASGSIFNINSMAWYRRAPGKQRELVASSTNGGSTNYADSVKGRFTISRDNAKRVYLQMNSLTPEDTAVYYCRALLQPSIYDISRTYWGQGTLVTVSS

SEQ ID NO: 436 - protein, 127 aa, Artificial Sequence
  F0103478E09 (L108Q)
EVQLVESGGGLVQAGGSLRLSCAASGRAFSTLAMGWFRQAPGKEREFVAAISRNGNNSATGDSLKGRFTISRDSTKSTVFLQMNTLKPEDTAVYYCAAISTPSASHPYVRKESYRYWGQGTQVTVSS

SEQ ID NO: 437 - protein, 116 aa, Artificial Sequence
  F0103505D08 (L108Q)
EVQLVESGGGLVQAGGSLRLSCVTSGRTSDLSTMNWFRQAPGKEREFVARITRRGSTYYAESVKERFIISRDNAKNTVYLQMNSLKPEDTANYYCTAASEMGYHYRGQGTQVTVSS

SEQ ID NO: 438 - protein, 123 aa, Artificial Sequence
  F0103500E03 (P14A,L108Q)
EVQLVESGGGLVQAGGSLRLSCAASGRTFSRYQMGWFRQAPGKEREFVAYISWSGSTRYVDSVKGRFTISRDNAKNTVYLQMNSLKPEDTAVYHCAAGTAGIISSRPETYDSWGQGTQVTVSS

SEQ ID NO: 439 - protein, 331 aa, Artificial Sequence
  F010302375:F0103275B05(E1D,N93R)-50GS-F0103478E09(L108Q)-FLAG3-HI S6
DVQLVESGGGLVQPGGSLRLSCAASGSIFNINSMAWYRRAPGKQRELVASSTNGGSTNYADSVKGRFTISRDNAKRVYLQMNSLTPEDTAVYYCRALLQPSIYDISRTYWGQGTLVTVSSGGGGSGGGGSGGGGSGGGGSGGGGSGGGGSGGGGSGGGGSGGGGSGGGGSEVQLVESGGGLVQAGGSLRLSCAASGRAFSTLAMGWFRQAPGKEREFVAAISRNGNNSATGDSLKGRFTISRDSTKSTVFLQMNTLKPEDTAVYYCAAISTPSASHPYVRKESYRYWGQGTQVTVSSGAADYKDHDGDYKDHDIDYKDDDDKGAAHHHHHH

SEQ ID NO: 440 - protein, 317 aa, Artificial Sequence
  F010302377:F0103275B05(E1D,N93R)-50GS-F0103492E09-FLAG3-HIS6
DVQLVESGGGLVQPGGSLRLSCAASGSIFNINSMAWYRRAPGKQRELVASSTNGGSTNYADSVKGRFTISRDNAKRVYLQMNSLTPEDTAVYYCRALLQPSIYDISRTYWGQGTLVTVSSGGGGSGGGGSGGGGSGGGGSGGGGSGGGGSGGGGSGGGGSGGGGSGGGGSEVQLVESGGGLVQAGGSLRLSCAASKSILSFAYMRWYRQAPGKQREFVASIAIGGATSYTDSVKGRFTISRDNAKNTVYLQMNSLKPEDTAVYYCSAPAGQYRGQGTLVTVSSGAADYKDHDGDYKDHDIDYKDDDDKGAAHHHHHH

SEQ ID NO: 441 - protein, 330 aa, Artificial Sequence
  F010302378:F0103275B05(E1D,N93R)-50GS-F0103495F09-FLAG3-HIS6
DVQLVESGGGLVQPGGSLRLSCAASGSIFNINSMAWYRRAPGKQRELVASSTNGGSTNYADSVKGRFTISRDNAKRVYLQMNSLTPEDTAVYYCRALLQPSIYDISRTYWGQGTLVTVSSGGGGSGGGGSGGGGSGGGGSGGGGSGGGGSGGGGSGGGGSGGGGSGGGGSEVQLVESGGGLVQAGSSLSLSCAASGRALSTYAMGWFRQAPGKEREFVARISRSGITTYYTDSVKGRFTISRDRAKDTVYLQMNSLKPEDTAIYLCAADASTNPAGYYLRNRYDYWGQGTLVTVSSGAADYKDHDGDYKDHDIDYKDDDDKGAAHHHHHH

SEQ ID NO: 442 - protein, 327 aa, Artificial Sequence
  F010302379:F0103275B05(E1D,N93R)-50GS-F0103500E03(P14A,L108Q)-FLA G3-HIS6
DVQLVESGGGLVQPGGSLRLSCAASGSIFNINSMAWYRRAPGKQRELVASSTNGGSTNYADSVKGRFTISRDNAKRVYLQMNSLTPEDTAVYYCRALLQPSIYDISRTYWGQGTLVTVSSGGGGSGGGGSGGGGSGGGGSGGGGSGGGGSGGGGSGGGGSGGGGSGGGGSEVQLVESGGGLVQAGGSLRLSCAASGRTFSRYQMGWFRQAPGKEREFVAYISWSGSTRYVDSVKGRFTISRDNAKNTVYLQMNSLKPEDTAVYHCAAGTAGIISSRPETYDSWGQGTQVTVSSGAADYKDHDGDYKDHDIDYKDDDDKGAAHHHHHH

SEQ ID NO: 443 - protein, 320 aa, Artificial Sequence
  F010302380:F0103275B05(E1D,N93R)-50GS-F0103505D08(L108Q)-FLAG3-HI S6
DVQLVESGGGLVQPGGSLRLSCAASGSIFNINSMAWYRRAPGKQRELVASSTNGGSTNYADSVKGRFTISRDNAKRVYLQMNSLTPEDTAVYYCRALLQPSIYDISRTYWGQGTLVTVSSGGGGSGGGGSGGGGSGGGGSGGGGSGGGGSGGGGSGGGGSGGGGSGGGGSEVQLVESGGGLVQAGGSLRLSCVTSGRTSDLSTMNWFRQAPGKEREFVARITRRGSTYYAESVKERFIISRDNAKNTVYLQMNSLKPEDTANYYCTAASEMGYHYRGQGTQVTVSSGAADYKDHDGDYKDHDIDYKDDDDKGAAHHHHHH

SEQ ID NO: 444 - protein, 327 aa, Artificial Sequence
  F010300191:F0103275B05-50GS-F0103240B04-FLAG3-HIS6
EVQLVESGGGLVQPGGSLRLSCAASGSIFNINSMAWYRRAPGKQRELVASSTNGGSTNYADSVKGRFTISRDNAKRVYLQMNSLTPEDTAVYYCNALLQPSIYDISRTYWGQGTLVTVSSGGGGSGGGGSGGGGSGGGGSGGGGSGGGGSGGGGSGGGGSGGGGSGGGGSEVQLVESGGGLVQAGGSLRLSCAASGGTGRRYAMGWFRQAPGKEREIVAAIRWSAMTYYADDGKGRFTISRDNAKNTVYLQMNSLKPEDTAIYYCAYTWDYFKYDQVRAYRGWGQGTLVTVSSGAADYKDHDGDYKDHDIDYKDDDDKGAAHHHHHH

SEQ ID NO: 445 - protein, 297 aa, Artificial Sequence
  F010302375 (No Tag) :F0103275B05(E1D,N93R)-50GS-F0103478E09(L108Q)
DVQLVESGGGLVQPGGSLRLSCAASGSIFNINSMAWYRRAPGKQRELVASSTNGGSTNYADSVKGRFTISRDNAKRVYLQMNSLTPEDTAVYYCRALLQPSIYDISRTYWGQGTLVTVSSGGGGSGGGGSGGGGSGGGGSGGGGSGGGGSGGGGSGGGGSGGGGSGGGGSEVQLVESGGGLVQAGGSLRLSCAASGRAFSTLAMGWFRQAPGKEREFVAAISRNGNNSATGDSLKGRFTISRDSTKSTVFLQMNTLKPEDTAVYYCAAISTPSASHPYVRKESYRYWGQGTQVTVSS

SEQ ID NO: 446 - protein, 283 aa, Artificial Sequence
  F010302377 (No Tag):F0103275B05(E1D,N93R)-50GS-F0103492E09
DVQLVESGGGLVQPGGSLRLSCAASGSIFNINSMAWYRRAPGKQRELVASSTNGGSTNYADSVKGRFTISRDNAKRVYLQMNSLTPEDTAVYYCRALLQPSIYDISRTYWGQGTLVTVSSGGGGSGGGGSGGGGSGGGGSGGGGSGGGGSGGGGSGGGGSGGGGSGGGGSEVQLVESGGGLVQAGGSLRLSCAASKSILSFAYMRWYRQAPGKQREFVASIAIGGATSYTDSVKGRFTISRDNAKNTVYLQMNSLKPEDTAVYYCSAPAGQYRGQGTLVTVSS

SEQ ID NO: 447 - protein, 296 aa, Artificial Sequence
  F010302378 (No Tag):F0103275B05(E1D,N93R)-50GS-F0103495F09
DVQLVESGGGLVQPGGSLRLSCAASGSIFNINSMAWYRRAPGKQRELVASSTNGGSTNYADSVKGRFTISRDNAKRVYLQMNSLTPEDTAVYYCRALLQPSIYDISRTYWGQGTLVTVSSGGGGSGGGGSGGGGSGGGGSGGGGSGGGGSGGGGSGGGGSGGGGSGGGGSEVQLVESGGGLVQAGSSLSLSCAASGRALSTYAMGWFRQAPGKEREFVARISRSGITTYYTDSVKGRFTISRDRAKDTVYLQMNSLKPEDTAIYLCAADASTNPAGYYLRNRYDYWGQGTLVTVSS

SEQ ID NO: 448 - protein, 293 aa, Artificial Sequence
  F010302379 (No Tag):F0103275B05(E1D,N93R)-50GS-F0103500E03(P14A,L108Q)
DVQLVESGGGLVQPGGSLRLSCAASGSIFNINSMAWYRRAPGKQRELVASSTNGGSTNYADSVKGRFTISRDNAKRVYLQMNSLTPEDTAVYYCRALLQPSIYDISRTYWGQGTLVTVSSGGGGSGGGGSGGGGSGGGGSGGGGSGGGGSGGGGSGGGGSGGGGSGGGGSEVQLVESGGGLVQAGGSLRLSCAASGRTFSRYQMGWFRQAPGKEREFVAYISWSGSTRYVDSVKGRFTISRDNAKNTVYLQMNSLKPEDTAVYHCAAGTAGIISSRPETYDSWGQGTQVTVSS

SEQ ID NO: 449 - protein, 286 aa, Artificial Sequence
  F010302380 (No Tag):F0103275B05(E1D,N93R)-50GS-F0103505D08(L108Q)
DVQLVESGGGLVQPGGSLRLSCAASGSIFNINSMAWYRRAPGKQRELVASSTNGGSTNYADSVKGRFTISRDNAKRVYLQMNSLTPEDTAVYYCRALLQPSIYDISRTYWGQGTLVTVSSGGGGSGGGGSGGGGSGGGGSGGGGSGGGGSGGGGSGGGGSGGGGSGGGGSEVQLVESGGGLVQAGGSLRLSCVTSGRTSDLSTMNWFRQAPGKEREFVARITRRGSTYYAESVKERFIISRDNAKNTVYLQMNSLKPEDTANYYCTAASEMGYHYRGQGTQVTVSS

SEQ ID NO: 450 - protein, 293 aa, Artificial Sequence
  F010300191 (No Tag):F0103275B05-50GS-F0103240B04
EVQLVESGGGLVQPGGSLRLSCAASGSIFNINSMAWYRRAPGKQRELVASSTNGGSTNYADSVKGRFTISRDNAKRVYLQMNSLTPEDTAVYYCNALLQPSIYDISRTYWGQGTLVTVSSGGGGSGGGGSGGGGSGGGGSGGGGSGGGGSGGGGSGGGGSGGGGSGGGGSEVQLVESGGGLVQAGGSLRLSCAASGGTGRRYAMGWFRQAPGKEREIVAAIRWSAMTYYADDGKGRFTISRDNAKNTVYLQMNSLKPEDTAIYYCAYTWDYFKYDQVRAYRGWGQGTLVTVSS

SEQ ID NO: 451 - protein, 169 aa, Artificial Sequence
  F0103PMP478E09
EVQLVESGGGLVQAGGSLRLSCAASGRAFSTLAMGWFRQAPGKEREFVAAISRNGNNSATGDSLKGRFTISRDSTKSTVFLQMNTLKPEDTAVYYCAAISTPSASHPYVRKESYRYWGQGTQVTVSSAAADYKDHDGDYKDHDIDYKDDDDKGAAHHHHHHKAAGGGGG

SEQ ID NO: 452 - protein, 155 aa, Artificial Sequence
  F0103PMP492E09
EVQLVESGGGLVQAGGSLRLSCAASKSILSFAYMRWYRQAPGKQREFVASIAIGGATSYTDSVKGRFTISRDNAKNTVYLQMNSLKPEDTAVYYCSAPAGQYRGQGTLVTVSSAAADYKDHDGDYKDHDIDYKDDDDKGAAHHHHHHKAAGGGGG

SEQ ID NO: 453 - protein, 168 aa, Artificial Sequence
  F0103PMP495F09
EVQLVESGGGLVQAGSSLSLSCAASGRALSTYAMGWFRQAPGKEREFVARISRSGITTYYTDSVKGRFTISRDRAKDTVYLQMNSLKPEDTAIYLCAADASTNPAGYYLRNRYDYWGQGTLVTVSSAAADYKDHDGDYKDHDIDYKDDDDKGAAHHHHHHKAAGGGGG

SEQ ID NO: 454 - protein, 160 aa, Artificial Sequence
  F0103PMP500E03
EVQLVESGGGLVQAGGSLRLSCAASGRTFSRYQMGWFRQAPGKEREFVAYISWSGSTRYVDSVKGRFTISRDNAKNTVYLQMNSLKPEDTAVYHCAAGTAGIISSRPETYDSWGQGTQVTVSSAAADYKDHDGDYKDHDIDYKDDDDKGAAHHHHHHKAA

SEQ ID NO: 455 - protein, 158 aa, Artificial Sequence
  F0103PMP505D08
EVQLVESGGGLVQAGGSLRLSCVTSGRTSDLSTMNWFRQAPGKEREFVARITRRGSTYYAESVKERFIISRDNAKNTVYLQMNSLKPEDTANYYCTAASEMGYHYRGQGTQVTVSSAAADYKDHDGDYKDHDIDYKDDDDKGAAHHHHHHKAAGGGGG

SEQ ID NO: 456 - protein, 432 aa, Artificial Sequence
  Nucleotide sequence encoding F0103240B04 (No tag)
ATGAAAAAGACCGCTATCGCGATTGCAGTGGCACTGGCTGGTTTGGCCACCGTGGCCCAGGCCGAGGTGCAATTGGTGGAGTCTGGGGGAGGATTGGTGCAGGCTGGGGGCTCTCTGAGACTCTCCTGTGCAGCCTCTGGAGGTACAGGCAGGAGATATGCCATGGGCTGGTTCCGCCAGGCTCCAGGGAAGGAGCGTGAAATTGTAGCAGCGATTAGGTGGAGTGCTATGACATACTATGCAGACGACGGGAAGGGCCGATTCACCATCTCCAGAGACAACGCCAAGAACACGGTGTATCTCCAAATGAACAGCCTGAAACCTGAGGACACGGCCATTTATTACTGTGCATACACTTGGGACTATTTCAAGTATGACCAAGTCCGAGCGTATCGCGGCTGGGGCCAGGGGACCCTGGTCACCGTCTCCTCA

SEQ ID NO: 457 - protein, 444 aa, Artificial Sequence
  Nucleotide sequence encoding F0103478E09 (No tag)
ATGAAAAAGACCGCTATCGCGATTGCAGTGGCACTGGCTGGTTTGGCCACCGTGGCCCAGGCCGAGGTGCAATTGGTGGAGTCTGGGGGAGGCTTGGTGCAGGCTGGGGGGTCTCTGAGACTCTCCTGTGCTGCCTCTGGACGCGCCTTCAGTACCTTGGCCATGGGCTGGTTCCGCCAGGCTCCAGGGAAGGAGCGTGAGTTTGTAGCAGCTATTAGCCGGAATGGTAATAACTCAGCCACTGGAGACTCCCTGAAGGGCCGATTCACCATCTCCAGAGACAGCACCAAGAGCACGGTTTTTCTGCAAATGAATACGCTGAAACCTGAGGACACGGCCGTATATTACTGTGCAGCCATCTCGACACCGTCCGCCAGTCATCCATACGTTCGCAAGGAAAGTTATAGATACTGGGGCCAGGGTACCCTGGTCACCGTCTCCTCA

SEQ ID NO: 458 - protein, 402 aa, Artificial Sequence
  Nucleotide sequence encoding F0103492E09 (No tag)
ATGAAAAAGACCGCTATCGCGATTGCAGTGGCACTGGCTGGTTTGGCCACCGTGGCCCAGGCCGAGGTGCAATTGGTGGAGTCTGGGGGAGGCTTGGTGCAGGCTGGGGGATCTCTGAGACTCTCCTGTGCAGCCTCTAAAAGCATCTTAAGTTTCGCTTACATGCGCTGGTACCGCCAGGCTCCAGGGAAGCAGCGCGAGTTCGTCGCAAGTATTGCTATTGGAGGTGCCACAAGCTATACAGACTCCGTGAAGGGCCGATTCACCATCTCCAGAGACAACGCCAAGAACACGGTGTATCTGCAAATGAACAGCCTGAAACCTGAGGACACAGCCGTCTATTACTGTAGTGCACCAGCCGGACAGTATCGGGGCCAGGGGACCCTGGTCACCGTCTCCTCA

SEQ ID NO: 459 - protein, 432 aa, Artificial Sequence
  Nucleotide sequence encoding F0103500E03 (No tag)
ATGAAAAAGACCGCTATCGCGATTGCAGTGGCACTGGCTGGTTTGGCCACCGTGGCCCAGGCCGAGGTGCAATTGGTGGAGTCTGGGGGAGGATTGGTGCAGCCGGGGGGCTCTCTGAGACTCTCCTGTGCAGCCTCTGGACGCACCTTCTCGCGCTATCAGATGGGCTGGTTCCGCCAGGCTCCAGGGAAGGAGCGTGAGTTTGTAGCATATATTAGCTGGAGTGGTAGTACACGTTATGTTGACTCCGTGAAGGGCCGATTCACCATCTCCAGAGACAACGCCAAGAACACGGTGTATCTGCAAATGAACAGCCTGAAACCTGAGGACACGGCCGTTTATCACTGTGCAGCAGGGACGGCCGGCATAATATCTAGTAGGCCTGAAACTTATGACTCATGGGGCCAGGGGACCCTGGTCACCGTCTCCTCA

SEQ ID NO: 460 - protein, 411 aa, Artificial Sequence
  Nucleotide sequence encoding F0103505D08 (No tag)
ATGAAAAAGACCGCTATCGCGATTGCAGTGGCACTGGCTGGTTTGGCCACCGTGGCCCAGGCCGAGGTGCAATTGGTGGAGTCTGGGGGAGGATTGGTGCAGGCTGGGGGCTCTCTGAGACTCTCCTGTGTAACCTCTGGACGCACCTCCGATTTGTCTACCATGAACTGGTTCCGCCAGGCTCCAGGAAAGGAGCGTGAGTTTGTCGCACGCATCACTCGGCGTGGTAGCACATACTATGCAGAGTCCGTGAAGGAACGATTCATCATCTCCAGAGACAACGCCAAGAACACGGTGTATTTGCAAATGAACAGCCTGAAACCAGAGGACACGGCCAATTATTACTGTACTGCAGCCTCAGAAATGGGATATCACTACAGGGGCCAGGGGACCCTGGTCACCGTCTCCTCA

SEQ ID NO: 461 - protein, 441 aa, Artificial Sequence
  Nucleotide sequence encoding F0103495F09 (No tag)
ATGAAAAAGACCGCTATCGCGATTGCAGTGGCACTGGCTGGTTTGGCCACCGTGGCCCAGGCCGAGGTGCAATTGGTGGAGTCTGGGGGAGGTTTGGTGCAGGCTGGAAGCTCTCTGAGTCTCTCCTGTGCAGCCTCTGGACGCGCCTTGAGTACATACGCCATGGGCTGGTTCCGCCAGGCTCCAGGGAAGGAGCGTGAGTTTGTAGCACGTATTAGCCGGAGCGGGATTACAACATACTATACAGACTCCGTGAAGGGCCGATTCACCATCTCCAGAGACCGCGCCAAGGACACGGTGTATCTGCAAATGAACAGCCTGAAACCTGAGGACACGGCCATTTATTTGTGTGCAGCAGACGCCTCAACCAATCCTGCTGGATACTACCTTCGGAATCGTTATGACTACTGGGGCCAGGGGACCCTGGTCACCGTCTCCTCA

SEQ ID NO: 462 - protein, 50 aa, Artificial Sequence
  50GS linker
GGGGSGGGGSGGGGSGGGGSGGGGSGGGGSGGGGSGGGGSGGGGSGGGGS

SEQ ID NO: 463 - protein, 1146 aa, Artificial Sequence
  Nucleotide sequence encoding F010302375 (No tag)
ATGAGATTTCCTTCAATTTTTACTGCTGTTTTATTCGCAGCATCCTCCGCATTAGCTGCTCCAGTCAACACTACAACAGAAGATGAAACGGCACAAATTCCGGCTGAAGCTGTCATCGGTTACTCAGATTTAGAAGGGGATTTCGATGTTGCTGTTTTGCCATTTTCCAACAGCACAAATAACGGGTTATTGTTTATAAATACTACTATTGCCAGCATTGCTGCTAAAGAAGAAGGGGTATCTCTCGAAAAGAGAGACGTGCAATTGGTGGAGTCTGGGGGAGGCTTGGTGCAGCCTGGGGGGTCTCTGAGACTCTCCTGTGCAGCCTCTGGAAGCATCTTCAATATCAACAGTATGGCCTGGTATCGCCGGGCTCCAGGGAAGCAGCGCGAATTGGTCGCAAGTAGCACCAATGGTGGTAGTACAAACTATGCAGACTCCGTGAAGGGCCGATTCACCATCTCTAGAGACAACGCCAAACGGGTGTATCTGCAAATGAACAGCCTGACACCTGAGGACACGGCCGTCTATTATTGTCGTGCACTGCTACAACCGTCGATTTATGACATTAGTCGCACATATTGGGGCCAGGGGACCCTGGTCACGGTCTCCTCCGGAGGTGGTGGCAGCGGTGGAGGTGGTTCTGGGGGTGGCGGTAGTGGCGGTGGTGGCTCAGGTGGCGGTGGGTCAGGCGGTGGTGGCAGTGGTGGGGGTGGCAGCGGTGGCGGTGGATCTGGTGGAGGTGGTTCTGGAGGTGGAGGATCCGAGGTGCAGTTGGTGGAGTCTGGGGGAGGCTTGGTGCAGGCTGGGGGGTCTCTGAGACTCTCCTGTGCTGCCTCTGGACGCGCCTTCAGTACCTTGGCCATGGGCTGGTTCCGCCAGGCTCCAGGGAAGGAGCGTGAGTTTGTAGCAGCTATTAGCCGGAATGGTAATAACTCAGCCACTGGAGACTCCCTGAAGGGCCGATTCACCATCTCCAGAGACAGCACCAAGAGCACGGTTTTTCTGCAAATGAATACGCTGAAACCTGAGGACACGGCCGTATATTACTGTGCAGCCATCTCGACACCGTCCGCCAGTCATCCATACGTTCGCAAGGAAAGTTATAGATACTGGGGCCAGGGTACCCAGGTCACCGTCTCCTCA

SEQ ID NO: 464 - protein, 1104 aa, Artificial Sequence
  Nucleotide sequence encoding F010302377 (No tag)
ATGAGATTTCCTTCAATTTTTACTGCTGTTTTATTCGCAGCATCCTCCGCATTAGCTGCTCCAGTCAACACTACAACAGAAGATGAAACGGCACAAATTCCGGCTGAAGCTGTCATCGGTTACTCAGATTTAGAAGGGGATTTCGATGTTGCTGTTTTGCCATTTTCCAACAGCACAAATAACGGGTTATTGTTTATAAATACTACTATTGCCAGCATTGCTGCTAAAGAAGAAGGGGTATCTCTCGAAAAGAGAGACGTGCAATTGGTGGAGTCTGGGGGAGGCTTGGTGCAGCCTGGGGGGTCTCTGAGACTCTCCTGTGCAGCCTCTGGAAGCATCTTCAATATCAACAGTATGGCCTGGTATCGCCGGGCTCCAGGGAAGCAGCGCGAATTGGTCGCAAGTAGCACCAATGGTGGTAGTACAAACTATGCAGACTCCGTGAAGGGCCGATTCACCATCTCTAGAGACAACGCCAAACGGGTGTATCTGCAAATGAACAGCCTGACACCTGAGGACACGGCCGTCTATTATTGTCGTGCACTGCTACAACCGTCGATTTATGACATTAGTCGCACATATTGGGGCCAGGGGACCCTGGTCACGGTCTCCTCCGGAGGTGGTGGCAGCGGTGGAGGTGGTTCTGGGGGTGGCGGTAGTGGCGGTGGTGGCTCAGGTGGCGGTGGGTCAGGCGGTGGTGGCAGTGGTGGGGGTGGCAGCGGTGGCGGTGGATCTGGTGGAGGTGGTTCTGGAGGTGGAGGATCCGAGGTGCAGTTGGTGGAGTCTGGGGGAGGCTTGGTGCAGGCTGGGGGATCTCTGAGACTCTCCTGTGCAGCCTCTAAAAGCATCTTAAGTTTCGCTTACATGCGCTGGTACCGCCAGGCTCCAGGGAAGCAGCGCGAGTTCGTCGCAAGTATTGCTATTGGAGGTGCCACAAGCTATACAGACTCCGTGAAGGGCCGATTCACCATCTCCAGAGACAACGCCAAGAACACGGTGTATCTGCAAATGAACAGCCTGAAACCTGAGGACACAGCCGTCTATTACTGTAGTGCACCAGCCGGACAGTATCGGGGCCAGGGGACCCTGGTCACCGTCTCCTCA

SEQ ID NO: 465 - protein, 1143 aa, Artificial Sequence
  Nucleotide sequence encoding F010302378 (No tag)
ATGAGATTTCCTTCAATTTTTACTGCTGTTTTATTCGCAGCATCCTCCGCATTAGCTGCTCCAGTCAACACTACAACAGAAGATGAAACGGCACAAATTCCGGCTGAAGCTGTCATCGGTTACTCAGATTTAGAAGGGGATTTCGATGTTGCTGTTTTGCCATTTTCCAACAGCACAAATAACGGGTTATTGTTTATAAATACTACTATTGCCAGCATTGCTGCTAAAGAAGAAGGGGTATCTCTCGAAAAGAGAGACGTGCAATTGGTGGAGTCTGGGGGAGGCTTGGTGCAGCCTGGGGGGTCTCTGAGACTCTCCTGTGCAGCCTCTGGAAGCATCTTCAATATCAACAGTATGGCCTGGTATCGCCGGGCTCCAGGGAAGCAGCGCGAATTGGTCGCAAGTAGCACCAATGGTGGTAGTACAAACTATGCAGACTCCGTGAAGGGCCGATTCACCATCTCTAGAGACAACGCCAAACGGGTGTATCTGCAAATGAACAGCCTGACACCTGAGGACACGGCCGTCTATTATTGTCGTGCACTGCTACAACCGTCGATTTATGACATTAGTCGCACATATTGGGGCCAGGGGACCCTGGTCACGGTCTCCTCCGGAGGTGGTGGCAGCGGTGGAGGTGGTTCTGGGGGTGGCGGTAGTGGCGGTGGTGGCTCAGGTGGCGGTGGGTCAGGCGGTGGTGGCAGTGGTGGGGGTGGCAGCGGTGGCGGTGGATCTGGTGGAGGTGGTTCTGGAGGTGGAGGATCCGAGGTGCAGTTGGTGGAGTCTGGGGGAGGTTTGGTGCAGGCTGGAAGCTCTCTGAGTCTCTCCTGTGCAGCCTCTGGACGCGCCTTGAGTACATACGCCATGGGCTGGTTCCGCCAGGCTCCAGGGAAGGAGCGTGAGTTTGTAGCACGTATTAGCCGGAGCGGGATTACAACATACTATACAGACTCCGTGAAGGGCCGATTCACCATCTCCAGAGACCGCGCCAAGGACACGGTGTATCTGCAAATGAACAGCCTGAAACCTGAGGACACGGCCATTTATTTGTGTGCAGCAGACGCCTCAACCAATCCTGCTGGATACTACCTTCGGAATCGTTATGACTACTGGGGCCAGGGGACCCTGGTCACCGTCTCCTCA

SEQ ID NO: 466 - protein, 1134 aa, Artificial Sequence
  Nucleotide sequence encoding F010302379 (No tag)
ATGAGATTTCCTTCAATTTTTACTGCTGTTTTATTCGCAGCATCCTCCGCATTAGCTGCTCCAGTCAACACTACAACAGAAGATGAAACGGCACAAATTCCGGCTGAAGCTGTCATCGGTTACTCAGATTTAGAAGGGGATTTCGATGTTGCTGTTTTGCCATTTTCCAACAGCACAAATAACGGGTTATTGTTTATAAATACTACTATTGCCAGCATTGCTGCTAAAGAAGAAGGGGTATCTCTCGAAAAGAGAGACGTGCAATTGGTGGAGTCTGGGGGAGGCTTGGTGCAGCCTGGGGGGTCTCTGAGACTCTCCTGTGCAGCCTCTGGAAGCATCTTCAATATCAACAGTATGGCCTGGTATCGCCGGGCTCCAGGGAAGCAGCGCGAATTGGTCGCAAGTAGCACCAATGGTGGTAGTACAAACTATGCAGACTCCGTGAAGGGCCGATTCACCATCTCTAGAGACAACGCCAAACGGGTGTATCTGCAAATGAACAGCCTGACACCTGAGGACACGGCCGTCTATTATTGTCGTGCACTGCTACAACCGTCGATTTATGACATTAGTCGCACATATTGGGGCCAGGGGACCCTGGTCACGGTCTCCTCCGGAGGTGGTGGCAGCGGTGGAGGTGGTTCTGGGGGTGGCGGTAGTGGCGGTGGTGGCTCAGGTGGCGGTGGGTCAGGCGGTGGTGGCAGTGGTGGGGGTGGCAGCGGTGGCGGTGGATCTGGTGGAGGTGGTTCTGGAGGTGGAGGATCCGAGGTGCAGTTGGTGGAGTCTGGGGGAGGATTGGTGCAGGCTGGGGGCTCTCTGAGACTCTCCTGTGCAGCCTCTGGACGCACCTTCTCGAGGTATCAGATGGGCTGGTTCCGCCAGGCTCCAGGGAAGGAGCGTGAGTTTGTAGCATATATTAGCTGGAGTGGTAGTACACGTTATGTTGACTCCGTGAAGGGCCGATTCACCATCTCCAGAGACAACGCCAAGAACACGGTGTATCTGCAAATGAACAGCCTGAAACCTGAGGACACGGCCGTTTATCACTGTGCAGCAGGGACGGCCGGCATAATATCTAGTAGGCCTGAAACTTATGACTCATGGGGCCAGGGGACCCAGGTCACCGTCTCCTCA

SEQ ID NO: 467 - protein, 1113 aa, Artificial Sequence
  Nucleotide sequence encoding F010302380(No tag)
ATGAGATTTCCTTCAATTTTTACTGCTGTTTTATTCGCAGCATCCTCCGCATTAGCTGCTCCAGTCAACACTACAACAGAAGATGAAACGGCACAAATTCCGGCTGAAGCTGTCATCGGTTACTCAGATTTAGAAGGGGATTTCGATGTTGCTGTTTTGCCATTTTCCAACAGCACAAATAACGGGTTATTGTTTATAAATACTACTATTGCCAGCATTGCTGCTAAAGAAGAAGGGGTATCTCTCGAAAAGAGAGACGTGCAATTGGTGGAGTCTGGGGGAGGCTTGGTGCAGCCTGGGGGGTCTCTGAGACTCTCCTGTGCAGCCTCTGGAAGCATCTTCAATATCAACAGTATGGCCTGGTATCGCCGGGCTCCAGGGAAGCAGCGCGAATTGGTCGCAAGTAGCACCAATGGTGGTAGTACAAACTATGCAGACTCCGTGAAGGGCCGATTCACCATCTCTAGAGACAACGCCAAACGGGTGTATCTGCAAATGAACAGCCTGACACCTGAGGACACGGCCGTCTATTATTGTCGTGCACTGCTACAACCGTCGATTTATGACATTAGTCGCACATATTGGGGCCAGGGGACCCTGGTCACGGTCTCCTCCGGAGGTGGTGGCAGCGGTGGAGGTGGTTCTGGGGGTGGCGGTAGTGGCGGTGGTGGCTCAGGTGGCGGTGGGTCAGGCGGTGGTGGCAGTGGTGGGGGTGGCAGCGGTGGCGGTGGATCTGGTGGAGGTGGTTCTGGAGGTGGAGGATCCGAGGTGCAGTTGGTGGAGTCTGGGGGAGGATTGGTGCAGGCTGGGGGCTCTCTGAGACTCTCCTGTGTAACCTCTGGACGCACCTCCGATTTGTCTACCATGAACTGGTTCCGCCAGGCTCCAGGAAAGGAGCGTGAGTTTGTCGCACGCATCACTCGGCGTGGTAGCACATACTATGCAGAGTCCGTGAAGGAACGATTCATCATCTCCAGAGACAACGCCAAGAACACGGTGTATTTGCAAATGAACAGCCTGAAACCAGAGGACACGGCCAATTATTACTGTACTGCAGCCTCAGAAATGGGATATCACTACAGGGGCCAGGGGACCCAGGTCACCGTCTCCTCA

SEQ ID NO: 468 - protein, 1128 aa, Artificial Sequence
  Nucleotide sequence encoding F010302391 (No tag)
ATGAGATTTCCTTCAATTTTTACTGCTGTTTTATTCGCAGCATCCTCCGCATTAGCTGCTCCAGTCAACACTACAACAGAAGATGAAACGGCACAAATTCCGGCTGAAGCTGTCATCGGTTACTCAGATTTAGAAGGGGATTTCGATGTTGCTGTTTTGCCATTTTCCAACAGCACAAATAACGGGTTATTGTTTATAAATACTACTATTGCCAGCATTGCTGCTAAAGAAGAAGGGGTATCTCTCGAAAAGAGAGACGTGCAATTGGTGGAGTCTGGGGGAGGCTTGGTGCAGCCTGGGGGGTCTCTGAGACTCTCCTGTGCAGCCTCTGGAAGCATCTTCAATATCAACAGTATGGCCTGGTATCGCCGGGCTCCAGGGAAGCAGCGCGAATTGGTCGCAAGTAGCACCAATGGTGGTAGTACAAACTATGCAGACTCCGTGAAGGGCCGATTCACCATCTCTAGAGACAACGCCAAACGGGTGTATCTGCAAATGAACAGCCTGACACCTGAGGACACGGCCGTCTATTATTGTCGTGCACTGCTACAACCGTCGATTTATGACATTAGTCGCACATATTGGGGCCAGGGGACCCTGGTCACGGTCTCCTCCGGAGGTGGTGGCAGCGGTGGAGGTGGTTCTGGGGGTGGCGGTAGTGGCGGTGGTGGCTCAGGTGGCGGTGGGTCAGGCGGTGGTGGCAGTGGTGGGGGTGGCAGCGGTGGCGGTGGATCTGGTGGAGGTGGTTCTGGAGGTGGAGGATCCGAGGTGCAGTTGGTGGAGTCTGGGGGAGGATTGGTGCAGGCTGGGGGCTCTCTGAGACTCTCCTGTGCAGCCTCTGGACGCACCGCTAGTATCTATGCCATGGCCTGGTTCCGCCAGGCTCAGGGGAAGGAGCGTGAATTTGTCGCAGTTATTACCCGGAGTGGTGGAACGATCGTCTATGCAGACTCCGTGAAGGGCCGATTCACCATCTCCAGAGACGACGCCAAGAACACTGTGTGGTTGCAAATGAGCGCTCTGAGACCTGAGGACACAGCCGTATATTTCTGTAATGCGGTTGCGGTCGAAGACGGGATGAACGTTATGAATTATTGGGGCCAGGGGACCCTGGTCACCGTCTCCTCA

SEQ ID NO: 469 - protein, 330 aa, Artificial Sequence [sequence omitted]

SEQ ID NO: 470 - protein, 330 aa, Artificial Sequence
  Human IgG1 HC Constant domain (L234A L235A D265S)
ASTKGPSVFPLAPSSKSTSGGTAALGCLVKDYFPEPVTVSWNSGALTSGVHTFPAVLQSSGLYSLSSVVTVPSSSLGTQTYICNVNHKPSNTKVDKKVEPKSCDKTHTCPPCPAPEAAGGPSVFLFPPKPKDTLMISRTPEVTCVVVSVSHEDPEVKFNWYVDGVEVHNAKTKPREEQYNSTYRVVSVLTVLHQDWLNGKEYKCKVSNKALPAPIEKTISKAKGQPREPQVYTLPPSRDELTKNQVSLTCLVKGFYPSDIAVEWESNGQPENNYKTTPPVLDSDGSFFLYSKLTVDKSRWQQGNVFSCSVMHEALHNHYTQKSLSLSPGK

SEQ ID NO: 471 - protein, 330 aa, Artificial Sequence
  Human IgG1 HC Constant domain (L234A L235A P329G)
ASTKGPSVFPLAPSSKSTSGGTAALGCLVKDYFPEPVTVSWNSGALTSGVHTFPAVLQSSGLYSLSSVVTVPSSSLGTQTYICNVNHKPSNTKVDKKVEPKSCDKTHTCPPCPAPEAAGGPSVFLFPPKPKDTLMISRTPEVTCVVVSVSHEDPEVKFNWYVDGVEVHNAKTKPREEQYNSTYRVVSVLTVLHQDWLNGKEYKCKVSNKALGAPIEKTISKAKGQPREPQVYTLPPSRDELTKNQVSLTCLVKGFYPSDIAVEWESNGQPENNYKTTPPVLDSDGSFFLYSKLTVDKSRWQQGNVFSCSVMHEALHNHYTQKSLSLSPGK

SEQ ID NO: 472 - protein, 330 aa, Artificial Sequence
  Human IgG1 HC Constant domain (L235E)
ASTKGPSVFPLAPSSKSTSGGTAALGCLVKDYFPEPVTVSWNSGALTSGVHTFPAVLQSSGLYSLSSVVTVPSSSLGTQTYICNVNHKPSNTKVDKKVEPKSCDKTHTCPPCPAPELEGGPSVFLFPPKPKDTLMISRTPEVTCVVVDVSHEDPEVKFNWYVDGVEVHNAKTKPREEQYNSTYRVVSVLTVLHQDWLNGKEYKCKVSNKALPAPIEKTISKAKGQPREPQVYTLPPSRDELTKNQVSLTCLVKGFYPSDIAVEWESNGQPENNYKTTPPVLDSDGSFFLYSKLTVDKSRWQQGNVFSCSVMHEALHNHYTQKSLSLSPGK

SEQ ID NO: 473 - protein, 330 aa, Artificial Sequence
  Human IgG1 HC Constant domain (D265A)
ASTKGPSVFPLAPSSKSTSGGTAALGCLVKDYFPEPVTVSWNSGALTSGVHTFPAVLQSSGLYSLSSVVTVPSSSLGTQTYICNVNHKPSNTKVDKKVEPKSCDKTHTCPPCPAPELLGGPSVFLFPPKPKDTLMISRTPEVTCVVVAVSHEDPEVKFNWYVDGVEVHNAKTKPREEQYNSTYRVVSVLTVLHQDWLNGKEYKCKVSNKALPAPIEKTISKAKGQPREPQVYTLPPSRDELTKNQVSLTCLVKGFYPSDIAVEWESNGQPENNYKTTPPVLDSDGSFFLYSKLTVDKSRWQQGNVFSCSVMHEALHNHYTQKSLSLSPGK

SEQ ID NO: 474 - protein, 330 aa, Artificial Sequence
  Human IgG1 HC Constant domain (D265A N297G)
ASTKGPSVFPLAPSSKSTSGGTAALGCLVKDYFPEPVTVSWNSGALTSGVHTFPAVLQSSGLYSLSSVVTVPSSSLGTQTYICNVNHKPSNTKVDKKVEPKSCDKTHTCPPCPAPELLGGPSVFLFPPKPKDTLMISRTPEVTCVVVAVSHEDPEVKFNWYVDGVEVHNAKTKPREEQYGSTYRVVSVLTVLHQDWLNGKEYKCKVSNKALPAPIEKTISKAKGQPREPQVYTLPPSRDELTKNQVSLTCLVKGFYPSDIAVEWESNGQPENNYKTTPPVLDSDGSFFLYSKLTVDKSRWQQGNVFSCSVMHEALHNHYTQKSLSLSPGK

SEQ ID NO: 475 - protein, 330 aa, Artificial Sequence
  Human IgG1 HC Constant domain (E233A/L235A)
ASTKGPSVFPLAPSSKSTSGGTAALGCLVKDYFPEPVTVSWNSGALTSGVHTFPAVLQSSGLYSLSSVVTVPSSSLGTQTYICNVNHKPSNTKVDKKVEPKSCDKTHTCPPCPAPALAGGPSVFLFPPKPKDTLMISRTPEVTCVVVDVSHEDPEVKFNWYVDGVEVHNAKTKPREEQYNSTYRVVSVLTVLHQDWLNGKEYKCKVSNKALPAPIEKTISKAKGQPREPQVYTLPPSRDELTKNQVSLTCLVKGFYPSDIAVEWESNGQPENNYKTTPPVLDSDGSFFLYSKLTVDKSRWQQGNVFSCSVMHEALHNHYTQKSLSLSPGK

SEQ ID NO: 476 - protein, 326 aa, Artificial Sequence
  Human IgG2 HC Constant domain
ASTKGPSVFPLAPCSRSTSESTAALGCLVKDYFPEPVTVSWNSGALTSGVHTFPAVLQSSGLYSLSSVVTVPSSNFGTQTYTCNVDHKPSNTKVDKTVERKCCVECPPCPAPPVAGPSVFLFPPKPKDTLMISRTPEVTCVVVDVSHEDPEVQFNWYVDGVEVHNAKTKPREEQFNSTFRVVSVLTVVHQDWLNGKEYKCKVSNKGLPAPIEKTISKTKGQPREPQVYTLPPSREEMTKNQVSLTCLVKGFYPSDISVEWESNGQPENNYKTTPPMLDSDGSFFLYSKLTVDKSRWQQGNVFSCSVMHEALHNHYTQKSLSLSPGK

SEQ ID NO: 477 - protein, 326 aa, Artificial Sequence
  Human IgG2 HC Constant domain (D265S)
ASTKGPSVFPLAPCSRSTSESTAALGCLVKDYFPEPVTVSWNSGALTSGVHTFPAVLQSSGLYSLSSVVTVPSSNFGTQTYTCNVDHKPSNTKVDKTVERKCCVECPPCPAPPVAGPSVFLFPPKPKDTLMISRTPEVTCVVVSVSHEDPEVQFNWYVDGVEVHNAKTKPREEQFNSTFRVVSVLTVVHQDWLNGKEYKCKVSNKGLPAPIEKTISKTKGQPREPQVYTLPPSREEMTKNQVSLTCLVKGFYPSDISVEWESNGQPENNYKTTPPMLDSDGSFFLYSKLTVDKSRWQQGNVFSCSVMHEALHNHYTQKSLSLSPGK

SEQ ID NO: 478 - protein, 326 aa, Artificial Sequence
  Human IgG2 HC Constant domain (P329G)
ASTKGPSVFPLAPCSRSTSESTAALGCLVKDYFPEPVTVSWNSGALTSGVHTFPAVLQSSGLYSLSSVVTVPSSNFGTQTYTCNVDHKPSNTKVDKTVERKCCVECPPCPAPPVAGPSVFLFPPKPKDTLMISRTPEVTCVVVDVSHEDPEVQFNWYVDGVEVHNAKTKPREEQFNSTFRVVSVLTVVHQDWLNGKEYKCKVSNKGLGAPIEKTISKTKGQPREPQVYTLPPSREEMTKNQVSLTCLVKGFYPSDISVEWESNGQPENNYKTTPPMLDSDGSFFLYSKLTVDKSRWQQGNVFSCSVMHEALHNHYTQKSLSLSPGK

SEQ ID NO: 479 - protein, 326 aa, Artificial Sequence
  Human IgG2 HC Constant domain (D265A)
ASTKGPSVFPLAPCSRSTSESTAALGCLVKDYFPEPVTVSWNSGALTSGVHTFPAVLQSSGLYSLSSVVTVPSSNFGTQTYTCNVDHKPSNTKVDKTVERKCCVECPPCPAPPVAGPSVFLFPPKPKDTLMISRTPEVTCVVVAVSHEDPEVQFNWYVDGVEVHNAKTKPREEQFNSTFRVVSVLTVVHQDWLNGKEYKCKVSNKGLPAPIEKTISKTKGQPREPQVYTLPPSREEMTKNQVSLTCLVKGFYPSDISVEWESNGQPENNYKTTPPMLDSDGSFFLYSKLTVDKSRWQQGNVFSCSVMHEALHNHYTQKSLSLSPGK

SEQ ID NO: 480 - protein, 326 aa, Artificial Sequence
  Human IgG2 HC Constant domain (D265A N297G)
ASTKGPSVFPLAPCSRSTSESTAALGCLVKDYFPEPVTVSWNSGALTSGVHTFPAVLQSSGLYSLSSVVTVPSSNFGTQTYTCNVDHKPSNTKVDKTVERKCCVECPPCPAPPVAGPSVFLFPPKPKDTLMISRTPEVTCVVVAVSHEDPEVQFNWYVDGVEVHNAKTKPREEQFGSTFRVVSVLTVVHQDWLNGKEYKCKVSNKGLPAPIEKTISKTKGQPREPQVYTLPPSREEMTKNQVSLTCLVKGFYPSDISVEWESNGQPENNYKTTPPMLDSDGSFFLYSKLTVDKSRWQQGNVFSCSVMHEALHNHYTQKSLSLSPGK

SEQ ID NO: 481 - protein, 326 aa, Artificial Sequence
  Human IgG2 HC Constant domain (V234A G237A P238S H268A V309L A330S P331S X378S/A)(See IgGsigma SEQ ID No:78 in WO2017079112)
  misc_feature (257)..(257): Xaa can be any naturally occurring amino acid
ASTKGPSVFPLAPCSRSTSESTAALGCLVKDYFPEPVTVSWNSGALTSGVHTFPAVLQSSGLYSLSSVVTVPSSNFGTQTYTCNVDHKPSNTKVDKTVERKCCVECPPCPAPPAAASSVFLFPPKPKDTLMISRTPEVTCVVVDVSAEDPEVQFNWYVDGVEVHNAKTKPREEQFNSTFRVVSVLTVLHQDWLNGKEYKCKVSNKGLPSSIEKTISKTKGQPREPQVYTLPPSREEMTKNQVSLTCLVKGFYPSDIXVEWESNGQPENNYKTTPPMLDSDGSFFLYSKLTVDKSRWQQGNVFSCSVMHEALHNHYTQKSLSLSPGK

SEQ ID NO: 482 - protein, 327 aa, Artificial Sequence
  Human IgG4 HC Constant domain (S228P)
ASTKGPSVFPLAPCSRSTSESTAALGCLVKDYFPEPVTVSWNSGALTSGVHTFPAVLQSSGLYSLSSVVTVPSSSLGTKTYTCNVDHKPSNTKVDKRVESKYGPPCPPCPAPEFLGGPSVFLFPPKPKDTLMISRTPEVTCVVVDVSQEDPEVQFNWYVDGVEVHNAKTKPREEQFNSTYRVVSVLTVLHQDWLNGKEYKCKVSNKGLPSSIEKTISKAKGQPREPQVYTLPPSQEEMTKNQVSLTCLVKGFYPSDIAVEWESNGQPENNYKTTPPVLDSDGSFFLYSRLTVDKSRWQEGNVFSCSVMHEALHNHYTQKSLSLSLGK

SEQ ID NO: 483 - protein, 327 aa, Artificial Sequence
  Human IgG4 HC Constant domain (S228P P329G)
ASTKGPSVFPLAPCSRSTSESTAALGCLVKDYFPEPVTVSWNSGALTSGVHTFPAVLQSSGLYSLSSVVTVPSSSLGTKTYTCNVDHKPSNTKVDKRVESKYGPPCPPCPAPEFLGGPSVFLFPPKPKDTLMISRTPEVTCVVVDVSQEDPEVQFNWYVDGVEVHNAKTKPREEQFNSTYRVVSVLTVLHQDWLNGKEYKCKVSNKGLGSSIEKTISKAKGQPREPQVYTLPPSQEEMTKNQVSLTCLVKGFYPSDIAVEWESNGQPENNYKTTPPVLDSDGSFFLYSRLTVDKSRWQEGNVFSCSVMHEALHNHYTQKSLSLSLGK

SEQ ID NO: 484 - protein, 327 aa, Artificial Sequence
  Human IgG4 HC Constant domain (S228P D265A)
ASTKGPSVFPLAPCSRSTSESTAALGCLVKDYFPEPVTVSWNSGALTSGVHTFPAVLQSSGLYSLSSVVTVPSSSLGTKTYTCNVDHKPSNTKVDKRVESKYGPPCPPCPAPEFLGGPSVFLFPPKPKDTLMISRTPEVTCVVVAVSQEDPEVQFNWYVDGVEVHNAKTKPREEQFNSTYRVVSVLTVLHQDWLNGKEYKCKVSNKGLPSSIEKTISKAKGQPREPQVYTLPPSQEEMTKNQVSLTCLVKGFYPSDIAVEWESNGQPENNYKTTPPVLDSDGSFFLYSRLTVDKSRWQEGNVFSCSVMHEALHNHYTQKSLSLSLGK

SEQ ID NO: 485 - protein, 327 aa, Artificial Sequence
  Human IgG4 HC Constant domain (S228P D265A N297G)
ASTKGPSVFPLAPCSRSTSESTAALGCLVKDYFPEPVTVSWNSGALTSGVHTFPAVLQSSGLYSLSSVVTVPSSSLGTKTYTCNVDHKPSNTKVDKRVESKYGPPCPPCPAPEFLGGPSVFLFPPKPKDTLMISRTPEVTCVVVAVSQEDPEVQFNWYVDGVEVHNAKTKPREEQFGSTYRVVSVLTVLHQDWLNGKEYKCKVSNKGLPSSIEKTISKAKGQPREPQVYTLPPSQEEMTKNQVSLTCLVKGFYPSDIAVEWESNGQPENNYKTTPPVLDSDGSFFLYSRLTVDKSRWQEGNVFSCSVMHEALHNHYTQKSLSLSLGK

SEQ ID NO: 486 - protein, 146 aa, Artificial Sequence
  F010301657
MKKTAIAIAVALAGLATVAQAEVQLVESGGGLVQPGGSLRLSCAASVRPFSTSAMGWFRQAPEKEREAVAGILWNGIVTYYADSVKGRFTISRDNAKNEVYLQMNKLKPEDTAVYYCALDRAYQGRSFSAKEYEYWGQGTLVTVSS

SEQ ID NO: 487 - protein, 146 aa, Artificial Sequence
  F010301658
MKKTAIAIAVALAGLATVAQAEVQLVESGGGLVQPGGSLRLSCAASVRPFSTSAMGWFRQAPEKEREAVAAILWNGIVTYYADSVKGRFTISRDNAKNEVYLQMNKLKPEDTAVYYCALDRAYQGRSFSAKEYEYWGQGTLVTVSS

SEQ ID NO: 488 - protein, 146 aa, Artificial Sequence
  F010301659
MKKTAIAIAVALAGLATVAQAEVQLVESGGGLVQPGGSLRLSCAASVRPFSTSAMGWFRQAPEKEREAVAAILWNGIVTYYADSVKGRFTISRDNAKNEVYLQMNKLKPEDTAVYYCALDRAYGGRSFSAYEYEYWGQGTLVTVSS

SEQ ID NO: 489 - protein, 146 aa, Artificial Sequence
  F010301661
MKKTAIAIAVALAGLATVAQAEVQLVESGGGLVQPGGSLRLSCAASVRPFSTSAMGWFRQAPEKEREAVAAILWNGIVTYYADSVKGRFTISRDNAKNEVYLQMNKLKPEDTAVYYCALDRDYGGRSFSAKEYEYWGQGTLVTVSS

SEQ ID NO: 490 - protein, 147 aa, Artificial Sequence
  F010301662
MKKTAIAIAVALAGLATVAQAEVQLVESGGGLVQPGGSLRLSCAASVRPFSTSAMGWFRQAPEKEREAVAGILWNGIVTYYADSVKGRFTISRDNAKNEVYLQMNKLKPEDTAVYYCALDRAYQGRSFSAYEYEYWGQGTLVTVSSA

SEQ ID NO: 491 - protein, 146 aa, Artificial Sequence
  F010301663
MKKTAIAIAVALAGLATVAQAEVQLVESGGGLVQPGGSLRLSCAASVRPFSTSAMGWFRQAPEKEREAVAGILWNGIVTYYADSVKGRFTISRDNAKNEVYLQMNKLKPEDTAVYYCALDRAYGGRSFSAKEYEYWGQGTLVTVSS

SEQ ID NO: 492 - protein, 146 aa, Artificial Sequence
  F010301664
MKKTAIAIAVALAGLATVAQAEVQLVESGGGLVQPGGSLRLSCAASVRPFSTSAMGWFRQAPEKEREAVAGILWNGIVTYYADSVKGRFTISRDNAKNEVYLQMNKLKPEDTAVYYCALDRDYQGRSFSAKEYEYWGQGTLVTVSS

SEQ ID NO: 493 - protein, 144 aa, Artificial Sequence
  F010301665
MKKTAIAIAVALAGLATVAQAEVQLVESGGGLVQPGGSLRLSCAASVRPFSTSAMGWFRQAPEKEREAVAAILWNGIVTYYADSVKGRFTISRDNAKNEVYLQMNKLKPEDTAVYYCALDRAYGGRSFSAKEYEYWGQGTLVTV

SEQ ID NO: 494 - protein, 146 aa, Artificial Sequence
  F010301666
MKKTAIAIAVALAGLATVAQAEVQLVESGGGLVQPGGSLRLSCAASVRPFSTSAMGWFRQAPEKEREAVAAILWNGIVTYYADSVKGRFTISRDNAKNEVYLQMNKLKPEDTAVYYCALDRDYQGRSFSAKEYEYWGQGTLVTVSS

SEQ ID NO: 495 - protein, 124 aa, Artificial Sequence
  F010301867
EVQLVESGGGLVQPGGSLRLSCATTSRQFIRDVFTGWYRRVPGKERELVARIYNGGNTNYADFAKGRFSISRDNAKKMVTLRMSNLKPEDTGVYYCLFSGTINTGREYRSGDYWGQGTLVTVSS

SEQ ID NO: 496 - protein, 124 aa, Artificial Sequence
  F010301878
EVQLVESGGGLVQPGGSLRLSCATTSRAFIRDVFTGWYRRVPGKERELVARIYNEGNTNYADFAKGRFSISRDNAKKMVTLRMSNLKPEDTGVYYCLFSGTINTGREYRSGDYWGQGTLVTVSS

SEQ ID NO: 497 - protein, 124 aa, Artificial Sequence
  F010301879
EVQLVESGGGLVQPGGSLRLSCATTSRAFIRDVFTGWYRRVPGKERELVARIYNQGNTNYADFAKGRFSISRDNAKKMVTLRMSNLKPEDTGVYYCLFSGTINTGREYRSGDYWGQGTLVTVSS

SEQ ID NO: 498 - protein, 124 aa, Artificial Sequence
  F010301880
EVQLVESGGGLVQPGGSLRLSCATTSRAFIRDVFTGWYRRVPGKERELVARIYNSGNTNYADFAKGRFSISRDNAKKMVTLRMSNLKPEDTGVYYCLFSGTINTGREYRSGDYWGQGTLVTVSS

SEQ ID NO: 499 - protein, 124 aa, Artificial Sequence
  F010301881
EVQLVESGGGLVQPGGSLRLSCATTSRAFIRDVFTGWYRRVPGKERELVARIYNWGNTNYADFAKGRFSISRDNAKKMVTLRMSNLKPEDTGVYYCLFSGTINTGREYRSGDYWGQGTLVTVSS

SEQ ID NO: 500 - protein, 124 aa, Artificial Sequence
  F010301882
EVQLVESGGGLVQPGGSLRLSCATTSRAFVRDVFTGWYRRVPGKERELVARIYNGGNTNYADFAKGRFSISRDNAKKMVTLRMSNLKPEDTGVYYCLFSGTINTGREYRSGDYWGQGTLVTVSS

SEQ ID NO: 501 - protein, 124 aa, Artificial Sequence
  F010301883
EVQLVESGGGLVQPGGSLRLSCATTSRAFIRDVFTGWYRRVPGKERELVARVYNGGNTNYADFAKGRFSISRDNAKKMVTLRMSNLKPEDTGVYYCLFSGTINTGREYRSGDYWGQGTLVTVSS

SEQ ID NO: 502 - protein, 124 aa, Artificial Sequence
  F010301884
EVQLVESGGGLVQPGGSLRLSCATTSRAFIRDVFTGWYRRVPGKERELVARIYAGGNTNYADFAKGRFSISRDNAKKMVTLRMSNLKPEDTGVYYCLFSGTINTGREYRSGDYWGQGTLVTVSS

SEQ ID NO: 503 - protein, 124 aa, Artificial Sequence
  F010301885
EVQLVESGGGLVQPGGSLRLSCATTSRAFIRDVFTGWYRRVPGKERELVARIYEGGNTNYADFAKGRFSISRDNAKKMVTLRMSNLKPEDTGVYYCLFSGTINTGREYRSGDYWGQGTLVTVSS

SEQ ID NO: 504 - protein, 124 aa, Artificial Sequence
  F010301886
EVQLVESGGGLVQPGGSLRLSCATTSRAFIRDVFTGWYRRVPGKERELVARIYNGGNTQYADFAKGRFSISRDNAKKMVTLRMSNLKPEDTGVYYCLFSGTINTGREYRSGDYWGQGTLVTVSS

SEQ ID NO: 505 - protein, 124 aa, Artificial Sequence
  F010301887
EVQLVESGGGLVQPGGSLRLSCATTSRAFIQDVFTGWYRRVPGKERELVARIYNGGNTNYADFAKGRFSISRDNAKKMVTLRMSNLKPEDTGVYYCLFSGTINTGREYRSGDYWGQGTLVTVSS

SEQ ID NO: 506 - protein, 124 aa, Artificial Sequence
  F010301888
EVQLVESGGGLVQPGGSLRLSCATTHRAFIRDVFTGWYRRVPGKERELVARIYNGGNTNYADFAKGRFSISRDNAKKMVTLRMSNLKPEDTGVYYCLFSGTINTGREYRSGDYWGQGTLVTVSS

SEQ ID NO: 507 - protein, 124 aa, Artificial Sequence
  F010301889
EVQLVESGGGLVQPGGSLRLSCATTSRAFIRDVFTGWYRRVPGKERELVARIYNGGNTNYADFAKGRFSISRDNAKKMVTLRMSNLKPEDTGVYYCLFAGTINTGREYRSGDYWGQGTLVTVSS

SEQ ID NO: 508 - protein, 124 aa, Artificial Sequence
  F010301890
EVQLVESGGGLVQPGGSLRLSCATTSRAFIRDVFVGWYRRVPGKERELVARIYNGGNTNYADFAKGRFSISRDNAKKMVTLRMSNLKPEDTGVYYCLFSGTINTGREYRSGDYWGQGTLVTVSS

SEQ ID NO: 509 - protein, 124 aa, Artificial Sequence
  F010301891
EVQLVESGGGLVQPGGSLRLSCATTSRAFIRDVFTGWYRRVPGKERELVARIYNGGNVNYADFAKGRFSISRDNAKKMVTLRMSNLKPEDTGVYYCLFSGTINTGREYRSGDYWGQGTLVTVSS

SEQ ID NO: 510 - protein, 111 aa, Artificial Sequence
  F010300534
EVQLVESGGGLVQPGGSLRLSCAASGMLFNANTQGWYRQAPGKQRELVAFIFSGGYVNYVDSVKGRFTISRDNAKRTMYLQMNSLKPEDSAIYYCSLSRYLGQGTLVTVSS

SEQ ID NO: 511 - protein, 111 aa, Artificial Sequence
  F010300535
EVQLVESGGGLVQPGGSLRLSCAASGMLFNANTQGWYRQAPGKQRELVAFIFWGGYTNYVDSVKGRFTISRDNAKRTMYLQMNSLKPEDSAIYYCSLSRYLGQGTLVTVSS

SEQ ID NO: 512 - protein, 111 aa, Artificial Sequence
  F010300536
EVQLVESGGGLVQPGGSLRLSCAASGMLFNANTQGWYRQAPGKQRELVAFIFSGGYTTYVDSVKGRFTISRDNAKRTMYLQMNSLKPEDSAIYYCSLSRYLGQGTLVTVSS

SEQ ID NO: 513 - protein, 111 aa, Artificial Sequence
  F010301055
EVQLVESGGGLVQPGGSLRLSCAASGMLFNANTQGWYRQAPGKQRELVAFIFWGGYVNYVDSVKGRFTISRDNAKRTMYLQMNSLKPEDSAIYYCSLSRYLGQGTLVTVSS

SEQ ID NO: 514 - protein, 111 aa, Artificial Sequence
  F010301059
EVQLVESGGGLVQPGGSLRLSCAASGMLFNANTQGWYRQAPGKQRELVAFIFSGGYVNYNDSVKGRFTISRDNAKRTMYLQMNSLKPEDSAIYYCALSRYQGQGTLVTVSS

SEQ ID NO: 515 - protein, 111 aa, Artificial Sequence
  F010301080
EVQLVESGGGLVQPGGSLRLSCAASGMLFNANTQGWYRQAPGKQRELVAFIFWGGYVTYNDSVKGRFTISRDNAKRTMYLQMNSLKPEDSAIYYCSLSRYLGQGTLVTVSS

SEQ ID NO: 516 - protein, 111 aa, Artificial Sequence
  F010301090
EVQLVESGGGLVQPGGSLRLSCAASGMLFNANTQGWYRQAPGKQRELVAFIFSGGWTTYNDSVKGRFTISRDNAKRTMYLQMNSLKPEDSAIYYCSLSRYQGQGTLVTVSS

SEQ ID NO: 517 - protein, 111 aa, Artificial Sequence
  F010301099
EVQLVESGGGLVQPGGSLRLSCAASGMLFNANTQGWYRQAPGKQRELVAFIFSGGWVTYVDSVKGRFTISRDNAKRTMYLQMNSLKPEDSAIYYCSLSRYLGQGTLVTVSS

SEQ ID NO: 518 - protein, 111 aa, Artificial Sequence
  F010301111
EVQLVESGGGLVQPGGSLRLSCAASGMLFNANTQGWYRQAPGKQRELVAFIFSGGYVNYNDSVKGRFTISRDNAKRTMYLQMNSLKPEDSAIYYCALSRYLGQGTLVTVSS

SEQ ID NO: 519 - protein, 111 aa, Artificial Sequence
  F010301113
EVQLVESGGGLVQPGGSLRLSCAASGMLFNRNTQGWYRQAPGKQRELVAFIFSGGYTNYNDSVKGRFTISRDNAKRTMYLQMNSLKPEDSAIYYCSLSVYQGQGTLVTVSS

SEQ ID NO: 520 - protein, 111 aa, Artificial Sequence
  F010301126
EVQLVESGGGLVQPGGSLRLSCAASGMLFNRNTQGWYRQAPGKQRELVAFIFSGGYVTYNDSVKGRFTISRDNAKRTMYLQMNSLKPEDSAIYYCSLSRYLGQGTLVTVSS

SEQ ID NO: 521 - protein, 111 aa, Artificial Sequence
  F010301129
EVQLVESGGGLVQPGGSLRLSCAASGMLFNANTQGWYRQAPGKQRELVAFIFSGGWTNYNDSVKGRFTISRDNAKRTMYLQMNSLKPEDSAIYYCALSRYQGQGTLVTVSS

SEQ ID NO: 522 - protein, 111 aa, Artificial Sequence
  F010301138
EVQLVESGGGLVQPGGSLRLSCAASGMLFYANTQGWYRQAPGKQRELVAFIFSGGYTNYNDSVKGRFTISRDNAKRTMYLQMNSLKPEDSAIYYCALSRYQGQGTLVTVSS

SEQ ID NO: 523 - protein, 111 aa, Artificial Sequence
  F010301139
EVQLVESGGGLVQPGGSLRLSCAASGMLFNRNTQGWYRQAPGKQRELVAFWFSGGYVNYNDSVKGRFTISRDNAKRTMYLQMNSLKPEDSAIYYCSLSRYQGQGTLVTVSS

SEQ ID NO: 524 - protein, 111 aa, Artificial Sequence
  F010301162
EVQLVESGGGLVQPGGSLRLSCAASGMLFNRNTQGWYRQAPGKQRELVAFIFSGGWTNYNDSVKGRFTISRDNAKRTMYLQMNSLKPEDSAIYYCSLSRYQGQGTLVTVSS

SEQ ID NO: 525 - protein, 111 aa, Artificial Sequence
  F010301175
EVQLVESGGGLVQPGGSLRLSCAASGMLFNRNTQGWYRQAPGKQRELVAFIFSGGYTTYVDSVKGRFTISRDNAKRTMYLQMNSLKPEDSAIYYCSLSRYLGQGTLVTVSS

SEQ ID NO: 526 - protein, 111 aa, Artificial Sequence
  F010301188
EVQLVESGGGLVQPGGSLRLSCAASGMLFNRNTQGWYRQAPGKQRELVAFIFSGGYTNYNDSVKGRFTISRDNAKRTMYLQMNSLKPEDSAIYYCSLSRYQGQGTLVTVSS

SEQ ID NO: 527 - protein, 111 aa, Artificial Sequence
  F010301191
EVQLVESGGGLVQPGGSLRLSCAASGMLFNRNTQGWYRQAPGKQRELVAFIFSGGWTNYNDSVKGRFTISRDNAKRTMYLQMNSLKPEDSAIYYCALSVYQGQGTLVTVSS

SEQ ID NO: 528 - protein, 111 aa, Artificial Sequence
  F010301232
EVQLVESGGGLVQPGGSLRLSCAASGMLFNRNTQGWYRQAPGKQRELVAFIFSGGYTTYVDSVKGRFTISRDNAKRTMYLQMNSLKPEDSAIYYCALSRYQGQGTLVTVSS

SEQ ID NO: 529 - protein, 111 aa, Artificial Sequence
  F010301458
EVQLVESGGGLVQPGGSLRLSCAASGMLFNRNTQGWYRQAPGKQRELVAFIFSGGWTNYNDSVKGRFTISRDNAKRTMYLQMNSLKPEDSAIYYCALSRYQGQGTLVTVSS

SEQ ID NO: 530 - protein, 111 aa, Artificial Sequence
  F010301463
EVQLVESGGGLVQPGGSLRLSCAASGMLFNRNTQGWYRQAPGKQRELVAFIFSGGYTNYNDSVKGRFTISRDNAKRTMYLQMNSLKPEDSAIYYCALSRYQGQGTLVTVSS

SEQ ID NO: 531 - protein, 124 aa, Artificial Sequence
  F010301301
EVQLVESGGGLVQAGGSLRLSCDASGRILRTGYMRWHRQGAGKQREFVARITDDSATDYADSVKGRFTISRDNAKNTVYLQMNNLNPEDTAVYYCEALVTASVRGGSIHSGTYWGRGTLVTVSS

SEQ ID NO: 532 - protein, 124 aa, Artificial Sequence
  F010301304
EVQLVESGGGLVQAGGSLRLSCDASGRILRWGYMRWHRQGAGKQREFVARITDDSATDYADSVKGRFTISRDNAKNTVYLQMNNLNPEDTAVYYCEALVTASVRGGSIHSGTYWGRGTLVTVSS

SEQ ID NO: 533 - protein, 124 aa, Artificial Sequence
  F010301309
EVQLVESGGGLVQAGGSLRLSCDASGRIVRIGYMRWHRQGAGKQREFVARITDDSATDYADSVKGRFTISRDNAKNTVYLQMNNLNPEDTAVYYCEALVTASVRGGSIHSGTYWGRGTLVTVSS

SEQ ID NO: 534 - protein, 124 aa, Artificial Sequence
  F010301313
EVQLVESGGGLVQAGGSLRLSCDASGRILRIGYMKWHRQGAGKQREFVARITDDSATDYADSVKGRFTISRDNAKNTVYLQMNNLNPEDTAVYYCEALVTASVRGGSIHSGTYWGRGTLVTVSS

SEQ ID NO: 535 - protein, 124 aa, Artificial Sequence
  F010301314
EVQLVESGGGLVQAGGSLRLSCAASGRILRIGYMRWHRQGAGKQREFVARITDDSATDYADSVKGRFTISRDNAKNTVYLQMNNLNPEDTAVYYCEALVTASVRGGSIHSGTYWGRGTLVTVSS

SEQ ID NO: 536 - protein, 124 aa, Artificial Sequence
  F010301328
EVQLVESGGGLVQAGGSLRLSCDASGRILRIGYMRWHRQGAGKQREFVARITDDSAVDYADSVKGRFTISRDNAKNTVYLQMNNLNPEDTAVYYCEALVTASVRGGSIHSGTYWGRGTLVTVSS

SEQ ID NO: 537 - protein, 124 aa, Artificial Sequence
  F010301335
EVQLVESGGGLVQAGGSLRLSCDASGRILRIGYMRWHRQGAGKQREFVAVITDDSATDYADSVKGRFTISRDNAKNTVYLQMNNLNPEDTAVYYCEALVTASVRGGSIHSGTYWGRGTLVTVSS

SEQ ID NO: 538 - protein, 124 aa, Artificial Sequence
  F010301344
EVQLVESGGGLVQAGGSLRLSCDASGRILRIGYMRWHRQGAGKQREFVARITDGSATDYADSVKGRFTISRDNAKNTVYLQMNNLNPEDTAVYYCEALVTASVRGGSIHSGTYWGRGTLVTVSS

SEQ ID NO: 539 - protein, 124 aa, Artificial Sequence
  F010301346
EVQLVESGGGLVQAGGSLRLSCDASGRILRIGYMRWHRQGAGKQREFVARITDDSATGYADSVKGRFTISRDNAKNTVYLQMNNLNPEDTAVYYCEALVTASVRGGSIHSGTYWGRGTLVTVSS

SEQ ID NO: 540 - protein, 124 aa, Artificial Sequence
  F010301350
EVQLVESGGGLVQAGGSLRLSCDASGRILRIGYMRWHRQGAGKQREFVARITDDSATVYADSVKGRFTISRDNAKNTVYLQMNNLNPEDTAVYYCEALVTASVRGGSIHSGTYWGRGTLVTVSS

SEQ ID NO: 541 - protein, 124 aa, Artificial Sequence
  F010301360
EVQLVESGGGLVQAGGSLRLSCDASGRILRIGYMRWHRQGAGKQREFVARITDDSTTDYADSVKGRFTISRDNAKNTVYLQMNNLNPEDTAVYYCEALVTASVRGGSIHSGTYWGRGTLVTVSS

SEQ ID NO: 542 - protein, 124 aa, Artificial Sequence
  F010301367
EVQLVESGGGLVQAGGSLRLSCDASGRILRIGYMRWHRQGAGKQREFVARITGDSATDYADSVKGRFTISRDNAKNTVYLQMNNLNPEDTAVYYCEALVTASVRGGSIHSGTYWGRGTLVTVSS

SEQ ID NO: 543 - protein, 124 aa, Artificial Sequence
  F010301372
EVQLVESGGGLVQAGGSLRLSCDASGRILRIGYMRWHRQGAGKQREFVARITDDSATDYADSVKGRFTISRDNAKNTVYLQMNNLNPEDTAVYYCEALVTASVRGGGIHSGTYWGRGTLVTVSS

SEQ ID NO: 544 - protein, 124 aa, Artificial Sequence
  F010301387
EVQLVESGGGLVQAGGSLRLSCDASGRILRIGYMRWHRQGAGKQREFVARITDDSATDYADSVKGRFTISRDNAKNTVYLQMNNLNPEDTAVYYCEALVTASARGGSIHSGTYWGRGTLVTVSS

SEQ ID NO: 545 - protein, 124 aa, Artificial Sequence
  F010301409
EVQLVESGGGLVQAGGSLRLSCDASGRILRIGYMRWHRQGAGKQREFVARITDDSATDYADSVKGRFTISRDNAKNTVYLQMNNLNPEDTAVYYCEALVTASVRGGSIVSGTYWGRGTLVTVSS

SEQ ID NO: 546 - protein, 124 aa, Artificial Sequence
  F010301416
EVQLVESGGGLVQAGGSLRLSCDASGRILRIGYMRWHRQGAGKQREFVARITDDSATDYADSVKGRFTISRDNAKNTVYLQMNNLNPEDTAVYYCEALVTASVRGGSIHSGQYWGRGTLVTVSS

SEQ ID NO: 547 - protein, 124 aa, Artificial Sequence
  F010301418
EVQLVESGGGLVQAGGSLRLSCDASGRILRIGYMRWHRQGAGKQREFVARITDDSATDYADSVKGRFTISRDNAKNTVYLQMNNLNPEDTAVYYCEALVTASVRGGSIHSGTWWGRGTLVTVSS

SEQ ID NO: 548 - protein, 124 aa, Artificial Sequence
  F010301425
EVQLVESGGGLVQAGGSLRLSCDASGRILRIGYMRWHRQGAGKQREFVARITDDSATDYADSVKGRFTISRDNAKNTVYLQMNNLNPEDTAVYYCEALVTASVRVGSIHSGTYWGRGTLVTVSS

SEQ ID NO: 549 - protein, 124 aa, Artificial Sequence
  F010301440
EVQLVESGGGLVQAGGSLRLSCDASGRILRIGYMRWHRQGAGKQREFVARITDDSATDYADSVKGRFTISRDNAKNTVYLQMNNLNPEDTAVYYCEALVTASVRGGSIHSTTYWGRGTLVTVSS

SEQ ID NO: 550 - protein, 124 aa, Artificial Sequence
  F010301445
EVQLVESGGGLVQAGGSLRLSCDASGRILRIGYMRWHRQGAGKQREFVARITDDSATDYADSVKGRFTISRDNAKNTVYLQMNNLNPEDTAVYYCEALVTASVRGGYIHSGTYWGRGTLVTVSS

SEQ ID NO: 551 - protein, 124 aa, Artificial Sequence
  F010301557
EVQLVESGGGLVQAGGSLRLSCAASGRILRIGYMRWHRQGAGKQREFVARITGGSATDYADSVKGRFTISRDNAKNTVYLQMNNLNPEDTAVYYCEALVTASVRGGSIHSGTYWGRGTLVTVSS

SEQ ID NO: 552 - protein, 124 aa, Artificial Sequence
  F010301558
EVQLVESGGGLVQAGGSLRLSCAASGRILRIGYMRWHRQGAGKQREFVARITGDSATGYADSVKGRFTISRDNAKNTVYLQMNNLNPEDTAVYYCEALVTASVRGGSIHSGTYWGRGTLVTVSS

SEQ ID NO: 553 - protein, 124 aa, Artificial Sequence
  F010301559
EVQLVESGGGLVQAGGSLRLSCAASGRILRIGYMRWHRQGAGKQREFVARITDGSATGYADSVKGRFTISRDNAKNTVYLQMNNLNPEDTAVYYCEALVTASVRGGSIHSGTYWGRGTLVTVSS

SEQ ID NO: 554 - protein, 124 aa, Artificial Sequence
  F010301560
EVQLVESGGGLVQAGGSLRLSCDASGRILRIGYMRWHRQGAGKQREFVARITGGSATGYADSVKGRFTISRDNAKNTVYLQMNNLNPEDTAVYYCEALVTASVRGGSIHSGTYWGRGTLVTVSS

SEQ ID NO: 555 - protein, 124 aa, Artificial Sequence
  F010301561
EVQLVESGGGLVQAGGSLRLSCAASGRILRIGYMRWHRQGAGKQREFVARITGDSATDYADSVKGRFTISRDNAKNTVYLQMNNLNPEDTAVYYCEALVTASVRGGSIHSGTYWGRGTLVTVSS

SEQ ID NO: 556 - protein, 124 aa, Artificial Sequence
  F010301562
EVQLVESGGGLVQAGGSLRLSCAASGRILRIGYMRWHRQGAGKQREFVARITDGSATDYADSVKGRFTISRDNAKNTVYLQMNNLNPEDTAVYYCEALVTASVRGGSIHSGTYWGRGTLVTVSS

SEQ ID NO: 557 - protein, 124 aa, Artificial Sequence
  F010301564
EVQLVESGGGLVQAGGSLRLSCDASGRILRIGYMRWHRQGAGKQREFVARITGGSATDYADSVKGRFTISRDNAKNTVYLQMNNLNPEDTAVYYCEALVTASVRGGSIHSGTYWGRGTLVTVSS

SEQ ID NO: 558 - protein, 124 aa, Artificial Sequence
  F010301565
EVQLVESGGGLVQAGGSLRLSCDASGRILRIGYMRWHRQGAGKQREFVARITGDSATGYADSVKGRFTISRDNAKNTVYLQMNNLNPEDTAVYYCEALVTASVRGGSIHSGTYWGRGTLVTVSS

SEQ ID NO: 559 - protein, 124 aa, Artificial Sequence
  F010301566
EVQLVESGGGLVQAGGSLRLSCDASGRILRIGYMRWHRQGAGKQREFVARITDGSATGYADSVKGRFTISRDNAKNTVYLQMNNLNPEDTAVYYCEALVTASVRGGSIHSGTYWGRGTLVTVSS

SEQ ID NO: 560 - protein, 125 aa, Artificial Sequence
  F010301567
EVQLVESGGGLVQAGGSLRLSCAASVRPYSTSAMGWFRQAPEKEREAVAGILWNGIVTYYADSVKGRFTISRDNAKNEVYLQMNKLKPEDTAVYYCALDRDYGGRSFSAYEYEYWGQGTLVTVSS

SEQ ID NO: 561 - protein, 125 aa, Artificial Sequence
  F010301568
EVQLVESGGGLVQAGGSLRLSCAASVRPFSTSAMTWFRQAPEKEREAVAGILWNGIVTYYADSVKGRFTISRDNAKNEVYLQMNKLKPEDTAVYYCALDRDYGGRSFSAYEYEYWGQGTLVTVSS

SEQ ID NO: 562 - protein, 125 aa, Artificial Sequence
  F010301574
EVQLVESGGGLVQAGGSLRLSCAASVRPFSTSAMAWFRQAPEKEREAVAGILWNGIVTYYADSVKGRFTISRDNAKNEVYLQMNKLKPEDTAVYYCALDRDYGGRSFSAYEYEYWGQGTLVTVSS

SEQ ID NO: 563 - protein, 125 aa, Artificial Sequence
  F010301578
EVQLVESGGGLVQAGGSLRLSCAASVRPFGTSAMGWFRQAPEKEREAVAGILWNGIVTYYADSVKGRFTISRDNAKNEVYLQMNKLKPEDTAVYYCALDRDYGGRSFSAYEYEYWGQGTLVTVSS

SEQ ID NO: 564 - protein, 125 aa, Artificial Sequence
  F010301579
EVQLVESGGGLVQAGGSLRLSCAASVKPFSTSAMGWFRQAPEKEREAVAGILWNGIVTYYADSVKGRFTISRDNAKNEVYLQMNKLKPEDTAVYYCALDRDYGGRSFSAYEYEYWGQGTLVTVSS

SEQ ID NO: 565 - protein, 125 aa, Artificial Sequence
  F010301580
EVQLVESGGGLVQAGGSLRLSCAASVTPFSTSAMGWFRQAPEKEREAVAGILWNGIVTYYADSVKGRFTISRDNAKNEVYLQMNKLKPEDTAVYYCALDRDYGGRSFSAYEYEYWGQGTLVTVSS

SEQ ID NO: 566 - protein, 125 aa, Artificial Sequence
  F010301584
EVQLVESGGGLVQAGGSLRLSCAASVRPFSTSAMGWFRQAPEKEREAVAGILTNGIVTYYADSVKGRFTISRDNAKNEVYLQMNKLKPEDTAVYYCALDRDYGGRSFSAYEYEYWGQGTLVTVSS

SEQ ID NO: 567 - protein, 125 aa, Artificial Sequence
  F010301585
EVQLVESGGGLVQAGGSLRLSCAASVRPFSTSAMGWFRQAPEKEREAVAGILWNGIPTYYADSVKGRFTISRDNAKNEVYLQMNKLKPEDTAVYYCALDRDYGGRSFSAYEYEYWGQGTLVTVSS

SEQ ID NO: 568 - protein, 125 aa, Artificial Sequence
  F010301586
EVQLVESGGGLVQAGGSLRLSCAASVRPFSTSAMGWFRQAPEKEREAVAGILANGIVTYYADSVKGRFTISRDNAKNEVYLQMNKLKPEDTAVYYCALDRDYGGRSFSAYEYEYWGQGTLVTVSS

SEQ ID NO: 569 - protein, 125 aa, Artificial Sequence
  F010301589
EVQLVESGGGLVQAGGSLRLSCAASVRPFSTSAMGWFRQAPEKEREAVAGILWNGPVTYYADSVKGRFTISRDNAKNEVYLQMNKLKPEDTAVYYCALDRDYGGRSFSAYEYEYWGQGTLVTVSS

SEQ ID NO: 570 - protein, 125 aa, Artificial Sequence
  F010301591
EVQLVESGGGLVQAGGSLRLSCAASVRPFSTSAMGWFRQAPEKEREAVAGILWNGIVTYYADSVKGRFTISRDNAKNEVYLQMNKLKPEDTAVYYCALDRDYKGRSFSAYEYEYWGQGTLVTVSS

SEQ ID NO: 571 - protein, 125 aa, Artificial Sequence
  F010301592
EVQLVESGGGLVQAGGSLRLSCAASVRPFSTSAMGWFRQAPEKEREAVAGILWNGIVTYYADSVKGRFTISRDNAKNEVYLQMNKLKPEDTAVYYCALDRDYGGSSFSAYEYEYWGQGTLVTVSS

SEQ ID NO: 572 - protein, 125 aa, Artificial Sequence
  F010301593
EVQLVESGGGLVQAGGSLRLSCAASVRPFSTSAMGWFRQAPEKEREAVAGILWNGIVTYYADSVKGRFTISRDNAKNEVYLQMNKLKPEDTAVYYCALDKDYGGRSFSAYEYEYWGQGTLVTVSS

SEQ ID NO: 573 - protein, 125 aa, Artificial Sequence
  F010301594
EVQLVESGGGLVQAGGSLRLSCAASVRPFSTSAMGWFRQAPEKEREAVAGILWNGIVTYYADSVKGRFTISRDNAKNEVYLQMNKLKPEDTAVYYCALDRDYGGKSFSAYEYEYWGQGTLVTVSS

SEQ ID NO: 574 - protein, 125 aa, Artificial Sequence
  F010301595
EVQLVESGGGLVQAGGSLRLSCAASVRPFSTSAMGWFRQAPEKEREAVAGILWNGIVTYYADSVKGRFTISRDNAKNEVYLQMNKLKPEDTAVYYCALDRAYGGRSFSAYEYEYWGQGTLVTVSS

SEQ ID NO: 575 - protein, 125 aa, Artificial Sequence
  F010301596
EVQLVESGGGLVQAGGSLRLSCAASVRPFSTSAMGWFRQAPEKEREAVAGILWNGIVTYYADSVKGRFTISRDNAKNEVYLQMNKLKPEDTAVYYCALDRDYAGRSFSAYEYEYWGQGTLVTVSS

SEQ ID NO: 576 - protein, 125 aa, Artificial Sequence
  F010301598
EVQLVESGGGLVQAGGSLRLSCAASVRPFSTSAMGWFRQAPEKEREAVAGILWNGIVTYYADSVKGRFTISRDNAKNEVYLQMNKLKPEDTAVYYCALDRDYQGRSFSAYEYEYWGQGTLVTVSS

SEQ ID NO: 577 - protein, 125 aa, Artificial Sequence
  F010301604
EVQLVESGGGLVQAGGSLRLSCAASVRPFSTSAMGWFRQAPEKEREAVAGILWNGIVTYYADSVKGRFTISRDNAKNEVYLQMNKLKPEDTAVYYCALDRDYGGQSFSAYEYEYWGQGTLVTVSS

SEQ ID NO: 578 - protein, 125 aa, Artificial Sequence
  F010301606
EVQLVESGGGLVQAGGSLRLSCAASVRPFSTSAMGWFRQAPEKEREAVAGILWNGIVTYYADSVKGRFTISRDNAKNEVYLQMNKLKPEDTAVYYCALDRDYGGRSFSAKEYEYWGQGTLVTVSS

SEQ ID NO: 579 - protein, 125 aa, Artificial Sequence
  F010301607
EVQLVESGGGLVQAGGSLRLSCAASVRPFSTSAMGWFRQAPEKEREAVAGILWNGIVTYYADSVKGRFTISRDNAKNEVYLQMNKLKPEDTAVYYCALDRDYGGRSFSAAEYEYWGQGTLVTVSS

SEQ ID NO: 580 - protein, 125 aa, Artificial Sequence
  F010301609
EVQLVESGGGLVQAGGSLRLSCAASVRPFSTSAMGWFRQAPEKEREAVAGILWNGIVTYYADSVKGRFTISRDNAKNEVYLQMNKLKPEDTAVYYCALDRDYGGRSFSAQEYEYWGQGTLVTVSS

SEQ ID NO: 581 - protein, 125 aa, Artificial Sequence
  F010301612
EVQLVESGGGLVQAGGSLRLSCAASVRPFSTSAMGWFRQAPEKEREAVAGILWNGIVTYYADSVKGRFTISRDNAKNEVYLQMNKLKPEDTAVYYCALDRDYGGRSFSATEYEYWGQGTLVTVSS

SEQ ID NO: 582 - protein, 125 aa, Artificial Sequence
  F010301617
EVQLVESGGGLVQAGGSLRLSCAASVRPFSTSAMGWFRQAPEKEREAVAGILWNGIVTYYADSVKGRFTISRDNAKNEVYLQMNKLKPEDTAVYYCALDRDYGGRSQSAYEYEYWGQGTLVTVSS

SEQ ID NO: 583 - protein, 125 aa, Artificial Sequence
  F010301618
EVQLVESGGGLVQAGGSLRLSCAASVRPFSTSAMGWFRQAPEKEREAVAGILWNGIVTYYADSVKGRFTISRDNAKNEVYLQMNKLKPEDTAVYYCALDRDYGGRSFSAYEYEHWGQGTLVTVSS

SEQ ID NO: 584 - protein, 125 aa, Artificial Sequence
  F010301619
EVQLVESGGGLVQAGGSLRLSCAASVRPFSTSAMGWFRQAPEKEREAVAGILWNGIVTYYADSVKGRFTISRDNAKNEVYLQMNKLKPEDTAVYYCALDRDYGGRSKSAYEYEYWGQGTLVTVSS

SEQ ID NO: 585 - protein, 125 aa, Artificial Sequence
  F010301621
EVQLVESGGGLVQAGGSLRLSCAASVRPFSTSAMGWFRQAPEKEREAVAGILWNGIVTYYADSVKGRFTISRDNAKNEVYLQMNKLKPEDTAVYYCALDRDYGGRSFSAGEYEYWGQGTLVTVSS

SEQ ID NO: 586 - protein, 125 aa, Artificial Sequence
  F010301622
EVQLVESGGGLVQAGGSLRLSCAASVRPFSTSAMGWFRQAPEKEREAVAGILWNGIVTYYADSVKGRFTISRDNAKNEVYLQMNKLKPEDTAVYYCALDRDYGGRSFSADEYEYWGQGTLVTVSS

SEQ ID NO: 587 - protein, 125 aa, Artificial Sequence
  F010301627
EVQLVESGGGLVQAGGSLRLSCAASVRPFSTSAMGWFRQAPEKEREAVAAILWNGIVTYYADSVKGRFTISRDNAKNEVYLQMNKLKPEDTAVYYCALDRDYGGRSFSAYEYEYWGQGTLVTVSS

SEQ ID NO: 588 - protein, 125 aa, Artificial Sequence
  F010301629
EVQLVESGGGLVQAGGSLRLSCAASVRPFSTSAMGWFRQAPEKEREAVASILWNGIVTYYADSVKGRFTISRDNAKNEVYLQMNKLKPEDTAVYYCALDRDYGGRSFSAYEYEYWGQGTLVTVSS

SEQ ID NO: 589 - protein, 120 aa, Artificial Sequence
  F010300316
EVQLVESGGGLVQPGGSLRLSCAASGSIFNINSMAWYRRAPGKQRELVASSTNGGSWNYADSVKGRFTISRDNAKRVYLQMNSLTPEDTAVYYCNALLQPSIYDISRTYWGQGTLVTVSS

SEQ ID NO: 590 - protein, 120 aa, Artificial Sequence; identical to SEQ ID NO: 434
  F010300468

SEQ ID NO: 591 - protein, 120 aa, Artificial Sequence
  F010300477
EVQLVESGGGLVQPGGSLRLSCAASGSIFNINSMAWYRRAPGKQRELVASSTNGGSTNYADSVKGRFTISRDNAKRVYLQMNSLTPEDTAVYYCNWLLQPSIYDISRTYWGQGTLVTVSS

SEQ ID NO: 592 - protein, 120 aa, Artificial Sequence
  F010300631
EVQLVESGGGLVQPGGSLRLSCAASGPVFNINSMAWYRRAPGKQRELVAYSTPGGSTNYADSVKGRFTISRDNAKRVYLQMNSLTPEDTAVYYCRALLQPSIYDISRTYWGQGTLVTVSS

SEQ ID NO: 593 - protein, 120 aa, Artificial Sequence
  F010300659
EVQLVESGGGLVQPGGSLRLSCAASGPVFNINSMAWYRRAPGKQRELVAYSTPGWDWNYADSVKGRFTISRDNAKRVYLQMNSLTPEDTAVYYCRWLLQPSIYDISRTYWGQGTLVTVSS

SEQ ID NO: 594 - protein, 120 aa, Artificial Sequence
  F010300684
EVQLVESGGGLVQPGGSLRLSCAASGPVFNWNSMAWYRRAPGKQRELVASSTPGGSTNYADSVKGRFTISRDNAKRVYLQMNSLTPEDTAVYYCRALLQPSIYDISRIYWGQGTLVTVSS

SEQ ID NO: 595 - protein, 120 aa, Artificial Sequence
  F010300796
EVQLVESGGGLVQPGGSLRLSCAASGPVFNINRMAWYRRAPGKQRELVAYSTPGGDTNYADSVKGRFTISRDNAKRVYLQMNSLTPEDTAVYYCNALLQPSIYDISRTYWGQGTLVTVSS

SEQ ID NO: 596 - protein, 120 aa, Artificial Sequence
  F010300880
EVQLVESGGGLVQPGGSLRLSCAASGPVFNINRMAWYRRAPGKQRELVASSTPGGDTNYADSVKGRFTISRDNAKRVYLQMNSLTPEDTAVYYCRWLLQPSIYDISRTYWGQGTLVTVSS

SEQ ID NO: 597 - protein, 120 aa, Artificial Sequence
  F010300900
EVQLVESGGGLVQPGGSLRLSCAASGPVFNINRMAWYRRAPGKQRELVASSTPGGDTNYADSVKGRFTISRDNAKRVYLQMNSLTPEDTAVYYCRWLLQPSIYDISRIYWGQGTLVTVSS

SEQ ID NO: 598 - protein, 120 aa, Artificial Sequence
  F010300948
EVQLVESGGGLVQPGGSLRLSCAASGPVFNINRMAWYRRAPGKQRELVASSTPGGSTNYADSVKGRFTISRDNAKRVYLQMNSLTPEDTAVYYCRWLLQPSIYDISRIYWGQGTLVTVSS

SEQ ID NO: 599 - protein, 120 aa, Artificial Sequence
  F010300990
EVQLVESGGGLVQPGGSLRLSCAASGPVFNINRMAWYRRAPGKQRELVAYSTPGGSTNYADSVKGRFTISRDNAKRVYLQMNSLTPEDTAVYYCNALLQPSIYDISRIYWGQGTLVTVSS

SEQ ID NO: 600 - protein, 120 aa, Artificial Sequence
  F010301000
EVQLVESGGGLVQPGGSLRLSCAASGPVFNINRMAWYRRAPGKQRELVAYSTPGGDTNYADSVKGRFTISRDNAKRVYLQMNSLTPEDTAVYYCNALLQPSIYDISRIYWGQGTLVTVSS

SEQ ID NO: 601 - protein, 120 aa, Artificial Sequence
  F010301459
EVQLVESGGGLVQPGGSLRLSCAASGPVFNINRMAWYRRAPGKQRELVASSTPGGDTNYADSVKGRFTISRDNAKRVYLQMNSLTPEDTAVYYCRALLQPSIYDISRTYWGQGTLVTVSS

SEQ ID NO: 602 - protein, 120 aa, Artificial Sequence
  F010301460
EVQLVESGGGLVQPGGSLRLSCAASGPVFNINRMAWYRRAPGKQRELVAYSTPGGSTNYADSVKGRFTISRDNAKRVYLQMNSLTPEDTAVYYCRALLQPSIYDISRTYWGQGTLVTVSS

SEQ ID NO: 603 - protein, 120 aa, Artificial Sequence
  F010301462
EVQLVESGGGLVQPGGSLRLSCAASGPVFNINRMAWYRRAPGKQRELVAYSTPGGDTNYADSVKGRFTISRDNAKRVYLQMNSLTPEDTAVYYCRALLQPSIYDISRTYWGQGTLVTVSS

1. A Nav1.7 binder that binds to a human voltage-gated sodium channel Nav1.7α protein subunit (human NaV1.7α subunit) between amino acids 272 and 331 of the human NaV1.7α subunit Domain 1 S5-S6 loop, wherein the human NaV1.7α subunit comprises the amino acid sequence set forth in SEQ ID NO: 1.

2. The Nav1.7 binder of claim 1, wherein the Nav1.7 binder contacts amino acids F276, R277, E281, and V331 of the human NaV1.7α subunit.

3. The Nav1.7 binder of claim 2, wherein Nav1.7 binder binds to the human NaV1.7α subunit comprising one or more mutations at residue F276, R277, E281 and/or V331 with lower affinity than to human NaV1.7 alpha subunit lacking such mutations.

4. The Nav1.7 binder of claim 1, wherein the Nav1.7 binder further is capable of binding a rhesus monkey human NaV1.7α subunit with a lower affinity than it binds to the human NaV1.7α subunit.

5. The Nav1.7 binder of claim 1, wherein the Nav1.7 binder is an antigen-binding fragment of either an antibody or a heavy chain antibody.

6. The Nav1.7 binder of claim 1, wherein the Nav1.7 binder is an immunoglobulin single variable domain (ISVD).

7. The Nav1.7 binder of claim 6, wherein the Nav1.7 binder comprises:
(a) a complementarity determining region (CDR) 1 comprising the amino acid sequence set forth in SEQ ID NO: 247, a CDR2 comprising the amino acid sequence set forth in SEQ ID NO: 248, and a CDR3 comprising the amino acid sequence set forth in SEQ ID NO: 249; or
(b) a CDR1 comprising the amino acid sequence set forth in SEQ ID NO: 250, a CDR2 comprising the amino acid sequence set forth in SEQ ID NO: 251, and a CDR3 comprising the amino acid sequence set forth in SEQ ID NO: 252; or
(c) a CDR1 comprising the amino acid sequence set forth in SEQ ID NO: 253, a CDR2 comprising the amino acid sequence set forth in SEQ ID NO: 254, and a CDR3 comprising the amino acid sequence SRY; or
(d) a CDR1 comprising the amino acid sequence set forth in SEQ ID NO: 256, a CDR2 comprising the amino acid sequence set forth in SEQ ID NO: 257, and a CDR3 comprising the amino acid sequence set forth in SEQ ID NO: 258; or
(e) a CDR1 comprising the amino acid sequence set forth in SEQ ID NO: 259, a CDR2 comprising the amino acid sequence set forth in SEQ ID NO: 260, and a CDR3 comprising the amino acid sequence set forth in SEQ ID NO: 261; or
(f) a CDR1 comprising the amino acid sequence set forth in SEQ ID NO: 262, a CDR2 comprising the amino acid sequence set forth in SEQ ID NO: 263, and a CDR3 comprising the amino acid sequence set forth in SEQ ID NO: 264; or
(g) a CDR1 comprising the amino acid sequence set forth in SEQ ID NO: 196, a CDR2 comprising the amino acid sequence set forth in SEQ ID NO: 198, and a CDR3 comprising the amino acid sequence set forth in SEQ ID NO: 200; or
(h) a CDR1 comprising the amino acid sequence set forth in SEQ ID NO: 201, a CDR2 comprising the amino acid sequence set forth in SEQ ID NO: 202, and a CDR3 comprising the amino acid sequence set forth in SEQ ID NO: 206; or
(i) a CDR1 comprising the amino acid sequence set forth in SEQ ID NO: 207, a CDR2 comprising the amino acid sequence set forth in SEQ ID NO: 213, and a CDR3 comprising the amino acid sequence set forth in SEQ ID NO: 219; or
(j) a CDR1 comprising the amino acid sequence set forth in SEQ ID NO: 221, a CDR2 comprising the amino acid sequence set forth in SEQ ID NO: 223, and a CDR3 comprising the amino acid sequence set forth in SEQ ID NO: 225.

8. The Nav1.7 binder of claim 6, wherein the Nav1.7 binder comprises:
(a) a CDR1 comprising the amino acid sequence set forth in SEQ ID NO: 196 or SEQ ID NO: 197; a CDR2 comprising the amino acid sequence set forth in SEQ ID NO: 198 or SEQ ID NO: 199; and, a CDR3 comprising the amino acid sequence set forth in SEQ ID NO: 200; or
(b) a CDR1 comprising the amino acid sequence set forth in SEQ ID NO: 201; a CDR2 comprising the amino acid sequence set forth in SEQ ID NO: 202, SEQ ID NO: 203, SEQ ID NO: 204, or SEQ ID NO: 205; and, a CDR3 comprising the amino acid sequence set forth in SEQ ID NO: 206; or
(c) a CDR1 comprising the amino acid sequence set forth in SEQ ID NO: 207, SEQ ID NO: 208, SEQ ID NO: 209, SEQ ID NO: 210, SEQ ID NO: 211, or SEQ ID NO: 212; a CDR2 comprising the amino acid sequence set forth in SEQ ID NO: 213, SEQ ID NO: 214, SEQ ID NO: 215, SEQ ID NO: 216, SEQ ID NO: 217, or SEQ ID NO: 218; and a CDR3 comprising the amino acid sequence set forth in SEQ ID NO: 219; or
(d) a CDR1 comprising the amino acid sequence set forth in SEQ ID NO: 201 or SEQ ID NO: 222; a CDR2 comprising the amino acid sequence set forth in SEQ ID NO: 223 or SEQ ID NO: 224; and a CDR3 comprising the amino acid sequence set forth in SEQ ID NO: 225, SEQ ID NO: 226, SEQ ID NO: 227, SEQ ID NO: 228, SEQ ID NO: 229, SEQ ID NO: 230, SEQ ID NO: 231, SEQ ID NO: 232, or SEQ ID NO: 233; or
(e) a CDR1 comprising the amino acid sequence set forth in SEQ ID NO: 201; a CDR2 comprising the amino acid sequence set forth in SEQ ID NO: 205; and, a CDR3 comprising the amino acid sequence set forth in SEQ ID NO: 206; or
(f) a CDR1 comprising the amino acid sequence set forth in SEQ ID NO: 211; a CDR2 comprising the amino acid sequence set forth in SEQ ID NO: 215; and, a CDR3 comprising the amino acid sequence set forth in SEQ ID NO: 219; or
(g) a CDR1 comprising the amino acid sequence set forth in SEQ ID NO: 222; a CDR2 comprising the amino acid sequence set forth in SEQ ID NO: 223; and, a CDR3 comprising the amino acid sequence set forth in SEQ ID NO: 233.

9. The Nav1.7 binder of claim 6, wherein the Nav1.7 binder comprises:
(a) an amino acid sequence selected from the group consisting of SEQ ID NO: 46, SEQ ID NO: 47, SEQ ID NO: 48, SEQ ID NO: 49, SEQ ID NO: 50, SEQ ID NO: 51, SEQ ID NO: 52, SEQ ID NO: 53, SEQ ID NO: 54, and SEQ ID NO: 55;
(b) an amino acid sequence selected from the group consisting of SEQ ID NO: 69, SEQ ID NO: 70, SEQ ID NO: 71, SEQ ID NO: 72, SEQ ID NO: 73, SEQ ID NO: 74, SEQ ID NO: 75, SEQ ID NO: 76, SEQ ID NO: 77, SEQ ID NO: 78, SEQ ID NO: 79, SEQ ID NO: 80, and SEQ ID NO: 81; or
(c) an amino acid sequence selected from the group consisting of SEQ ID NO: 82, SEQ ID NO: 83, SEQ ID NO: 84, SEQ ID NO: 85, SEQ ID NO: 86, SEQ ID NO: 87, SEQ ID NO: 88, SEQ ID NO: 89, SEQ ID NO: 90, SEQ ID NO: 91, SEQ ID NO: 92, SEQ ID NO: 93, SEQ ID NO: 94, SEQ ID NO: 95, SEQ ID NO: 96, and SEQ ID NO: 97; or
(d) an amino acid sequence selected from the group consisting of SEQ ID NO: 98, SEQ ID NO: 99, SEQ ID NO: 100, SEQ ID NO: 102, SEQ ID NO: 103, SEQ ID NO: 104, SEQ ID NO: 105, SEQ ID NO: 106, SEQ ID NO: 107, SEQ ID NO: 108, SEQ ID NO: 109, SEQ ID NO: 110, SEQ ID NO: 111, SEQ ID NO: 112, SEQ ID NO: 113, SEQ ID NO: 114, SEQ ID NO: 115, SEQ ID NO: 116, SEQ ID NO: 117, SEQ ID NO: 118, SEQ ID NO: 119, SEQ ID NO: 120, SEQ ID NO: 121, SEQ ID NO: 122, SEQ ID NO: 123, SEQ ID NO: 124, SEQ ID NO: 125, SEQ ID NO: 126, SEQ ID NO: 127, SEQ ID NO: 128, SEQ ID NO: 129, SEQ ID NO: 130, SEQ ID NO: 131, SEQ ID NO: 132, SEQ ID NO: 133, SEQ ID NO: 134, SEQ ID NO: 135, SEQ ID NO: 136, SEQ ID NO: 137, SEQ ID NO: 138, SEQ ID NO: 139, SEQ ID NO: 140, SEQ ID NO: 141, SEQ ID NO: 142, SEQ ID NO: 143, SEQ ID NO: 144, SEQ ID NO: 145, SEQ ID NO: 146, SEQ ID NO: 147, SEQ ID NO: 148, SEQ ID NO: 149, SEQ ID NO: 150, SEQ ID NO: 151, SEQ ID NO: 152, and SEQ ID NO: 153; or
(e) an amino acid sequence selected from the group consisting of SEQ ID NO: 154, SEQ ID NO: 155, SEQ ID NO: 156, SEQ ID NO: 157, SEQ ID NO: 158, SEQ ID NO: 159, SEQ ID NO: 160, SEQ ID NO: 161, SEQ ID NO: 162, SEQ ID NO: 163, SEQ ID NO: 164, SEQ ID NO: 165, SEQ ID NO: 166, SEQ ID NO: 167, SEQ ID NO: 168, SEQ ID NO: 169, SEQ ID NO: 170, SEQ ID NO: 171, SEQ ID NO: 172, SEQ ID NO: 173, SEQ ID NO: 174, SEQ ID NO: 175, SEQ ID NO: 176, SEQ ID NO: 177, SEQ ID NO: 178, SEQ ID NO: 179, SEQ ID NO: 180, SEQ ID NO: 181, SEQ ID NO: 182, SEQ ID NO: 183, SEQ ID NO: 184, SEQ ID NO: 185, SEQ ID NO: 186, SEQ ID NO: 187, SEQ ID NO: 188, SEQ ID NO: 189, SEQ ID NO: 190, SEQ ID NO: 191, SEQ ID NO: 192, SEQ ID NO: 193, SEQ ID NO: 194, and SEQ ID NO: 195.

10-16. (canceled)

17. A composition comprising a Nav1.7 binder of claim 1, and a pharmaceutically acceptable carrier.

18. A method for treating an individual with chronic pain comprising:
administering to the individual a therapeutically effective amount of the Nav1.7 binder of claim 1 to treat the chronic pain.

19-24. (canceled)

25. A Navβ1 binder comprising:
(a) a first immunoglobulin single variable domain (ISVD) comprising three complementarity determining regions (CDRs) wherein CDR1 comprises the amino acid sequence set forth in SEQ ID NO: 425, CDR2 comprises the amino acid sequence set forth in SEQ ID NO: 426, and CDR3 comprises the amino acid sequence set forth in SEQ ID NO: 427; or,
(b) a second ISVD comprising three CDRs wherein CDR1 comprises the amino acid sequence set forth in SEQ ID NO: 437, CDR2 comprises the amino acid sequence set forth in SEQ ID NO: 438, and CDR3 comprise the amino acid sequence set forth in SEQ ID NO: 439.

26. The Navβ1 binder of claim 25, wherein the first ISVD comprises the amino acid sequence set forth in SEQ ID NO: 411 and the second ISVD comprises the amino acid sequence set forth in SEQ ID NO: 415.

27-30. (canceled)

31. A Navβ2 binder comprising:
(a) a first immunoglobulin single variable domain (ISVD) comprising three complementarity determining regions (CDRs) wherein CDR1 comprises the amino acid sequence set forth in SEQ ID NO: 422, a CDR2 comprising the amino acid sequence set forth in SEQ ID NO: 423, and a CDR3 comprising the amino acid sequence set forth in SEQ ID NO: 424;
(b) a second ISVD comprising three CDRs wherein CDR1 comprises the amino acid sequence set forth in SEQ ID NO: 428, a CDR2 comprising the amino acid sequence set forth in SEQ ID NO: 429, and a CDR3 comprising the amino acid sequence set forth in SEQ ID NO: 430;
(c) a third ISVD comprising three CDRs wherein CDR1 comprises the amino acid sequence set forth in SEQ ID NO: 431, a CDR2 comprising the amino acid sequence set forth in SEQ ID NO: 432, and a CDR3 comprising the amino acid sequence set forth in SEQ ID NO: 433; or
(d) a fourth ISVD comprising three CDRs wherein CDR1 comprises the amino acid sequence set forth in SEQ ID NO: 434, a CDR2 comprising the amino acid sequence set forth in SEQ ID NO: 435, and a CDR3 comprising the amino acid sequence set forth in SEQ ID NO: 436.

32-36. (canceled)

37. A Nav1.7-Navβ bispecific binder comprising a Nav1.7 binder of claim 1 and a Navβ binder selected from the group consisting of the Navβ1 binder of claim 25 and the Navβ2 binder of claim 31.

38-45. (canceled)
